(19) United States
(12) Patent Application Publication
(10) Pub. No.: US 2024/0229073 A1
(43) Pub. Date: Jul. 11, 2024

(54) ARENAVIRUSES AS VECTORS

(71) Applicants: Hookipa Biotech GmbH, Wien (AT); Universtät Basel, Basel (CH)

(72) Inventors: Timo SCHIPPERS, Vienna (AT); Klaus ORLINGER, Vienna (AT); Daniel PINSCHEWER, Binningen (CH); Weldi Bonilla PINSCHEWER, Binningen (CH); Sarah SCHMIDT, Vienna (AT)

(21) Appl. No.: 18/558,885

(22) PCT Filed: May 12, 2022
(86) PCT No.: PCT/EP2022/062976

§ 371 Date: Nov. 3, 2023

Related U.S. Application Data
(60) Provisional application No. 63/188,317, filed on May 13, 2021.

(51) Int. Cl. C12N 15/86; A61K 39/00; A61K 39/12; C07K 14/005; C07K 14/82

(52) U.S. Cl. CPC C12N 15/86; A61K 39/12; C07K 14/005; C07K 14/82; A61K 2039/5256; C07K 2319/02; C12N 2710/20022; C12N 2760/10022; C12N 2760/10043; C12N 2800/40

(57) ABSTRACT

The present application relates to arenavirus particles containing a genome engineered such that an arenaviral open reading frame (“ORF”) is sequestered into two or more functional fragments and these fragments are expressed from two or more viral mRNA transcripts. The arenavirus particles described herein are genetically stable and provide high-level transgene expression. In certain embodiments, the arenavirus particles are tri-segmented. In particular, described herein is a nucleotide sequence comprising one or more ORFs comprising a nucleotide sequence encoding a functional fragment of arenavirus GP, NP, L or Z. Also described herein is an arenavirus particle containing a genome engineered such that an arenaviral ORF is sequestered into two or more functional fragments and these fragments are expressed from two or more viral mRNA transcripts. Also described herein is an arenavirus genomic or antigenomic segment engineered such that the transcription thereof results in one or more mRNA transcripts comprising a nucleotide sequence encoding a functional fragment of arenavirus GP, NP, L or Z. The arenavirus particles described herein may be suitable for vaccines and/or treatment of diseases and/or for the use in immunotherapies.

[0001] This application claims benefit of U.S. Provisional Patent Application No. 63/188,317, filed May 13, 2021, the disclosure of which is incorporated by reference herein in its entirety.

### REFERENCE TO SEQUENCE LISTING SUBMITTED ELECTRONICALLY

[0002] This application incorporates by reference a Sequence Listing submitted with this application in ASCII format entitled “13194-072-228_Sequence_Listing.txt” created on May 10, 2022 and having a size of 741,993 bytes.

### 1. INTRODUCTION

[0003] The present application relates to arenavirus particles engineered such that an arenaviral open reading frame (“ORF”) is separated over two or more mRNA transcripts. The arenavirus particles described herein are genetically stable and provide high-level transgene expression. In certain embodiments, the arenavirus particles are tri-segmented. In particular, described herein is a nucleotide sequence comprising one or more ORFs comprising a nucleotide sequence encoding a functional fragment of arenavirus GP, NP, L or Z. Also described herein is an arenavirus particle engineered such that an arenaviral ORF is separated over two or more mRNA transcripts. Also described herein is an arenavirus genomic or antigenomic segment engineered such that the transcription thereof results in one or more mRNA transcripts comprising a nucleotide sequence encoding a functional fragment of arenavirus GP, NP, L or Z. The arenavirus particles described herein may be suitable for vaccines and/or treatment of diseases and/or for the use in immunotherapies.

### 2. BACKGROUND

### 2.1 Replicating Viral Vector Systems

[0004] Replicating viral vector systems are optimally suited for delivering a target antigen of choice with the aim of inducing a potent immune response against it. In particular, viral vector systems are useful when aiming to elicit strong CD8+ T cell responses such as in tumor immunotherapy or with the intent of curing a persistent viral infection. To serve as a viral delivery system, wild-type viruses can be re-engineered to incorporate transgenic sequences, allowing them to induce immune responses against the respective translation production, i.e., the target of choice. Additionally, when based on viruses with a (known or insufficiently defined) disease-causing potential, re-engineering should confer the resulting vector with a defined degree of attenuation. On the other hand, immunogenicity of virally vectored delivery systems commonly depends on the vector dose administered. Accordingly, attenuation should not reduce viral growth in tissue culture systems to the point of rendering industrial production impractical. The usefulness of a replication-competent vector system for medical use therefore depends substantially on the following criteria:
[0005] 1) good growth in cell culture, enabling the vector's production to high titers in industrial fermentation processes (production yields),
[0006] 2) stable attenuation, i.e., the inability of the vector to revert to wild-type-like (more virulent) replication behavior in the vaccinated host (genetic stability),
[0007] 3) high-level transgene expression to elicit strong immune responses against the desired target antigen(s) (transgene expression levels).

[0008] Arenaviruses such as lymphocytic choriomeningitis virus (LCMV) and Pichinde virus (PICV) have been re-engineered to serve as replicating yet attenuated delivery systems inducing immune responses against incorporated heterologous antigens (Cheng B Y, et al. (2015) J Virol 89, 7373-7384; Dhanwani R, et al. (2015) J Virol 90, 2551-2560; Emonet S F, et al. (2009) Proc Natl Acad Sci USA 106, 3473-3478; Kallert S M, et al. (2017) Nat Commun 8, 15327; Popkin D L, et al. (2011) J Virol 85, 7928-7932). The natural arenavirus genome consists of two RNA segments and contains open reading frames (ORFs) encoding for the glycoprotein and nucleoprotein, both encoded on the short (S) segment, as well as the polymerase L and matrix protein Z, which are encoded on the large (L) segment (FIG. 1A). In order to incorporate foreign transgenic sequences in addition to the four arenaviral ORFs, the S segment can be duplicated and the GP and NP ORFs of arenaviruses can be sequestered onto the resulting two S segments (S_{NP}, S_{GP}; FIGS. 1B-E; (Cheng B Y, et al. (2015) J Virol 89, 7373-7384; Emonet S F, et al. (2009) Proc Natl Acad Sci USA 106, 3473-3478; Kallert S M, et al. (2017) Nat Commun 8, 15327). The concept behind segregating NP and GP onto separate S segments is to force the virus to carry three genomic RNA segments in order to maintain its complete proteome. By consequence, there are four possibilities how to position NP, GP and two heterologous ORFs (designated as “h.p.” in FIGS. 1B-1G) on the two segments. These four possibilities here are referred to as r3LCMV, artLCMV, r3LCMVrev and artLCMVrev (FIGS. 1B-E). It has been demonstrated that r3LCMVrev and artLCMVrev grow to only very poor titers, much lower than r3LCMV or artLCMV (Cheng B Y, et al. (2015) J Virol 89, 7373-7384), and thus fail to meet the above criterion 1. Poor growth of r3LCMVrev and artLCMVrev supposedly results from NP being positioned next to the 5′ untranslated region (UTR), and thus being expressed under control of the respective (weaker) viral promoter sequences. Accordingly, the r3LCMVrev and artLCMVrev designs are not well suited for industrial production. Kallert et al. (Kallert S M, et al. (2017) Nat Commun 8, 15327) have further demonstrated that r3LCMV is genetically unstable: During infection of immunodeficient mice, r3LCMV underwent inter-segmental RNA recombination yielding a bi-segmented virus, which had reunited the NP and GP ORFs on one RNA segment. The resulting virus had lost (most of) its transgenes and no longer was attenuated (FIG. 1F), thus failed to meet the above criterion 2 owing to safety concerns. In summary, neither r3LCMV nor r3LCMVrev met all three criteria (production yields, genetic stability, transgene expression levels). In contrast artLCMV was genetically stable even after prolonged periods of replication in immunodeficient animals. The underlying mechanistic explanation was that the NP and GP ORFs in artLCMV could hypothetically be recombined on one S segment (FIG. 1G), but such recombination could only occur at the expense of losing the 5′ UTR while duplicating the 3′ UTR on both ends of the resulting S segment. The 5′ UTR and the 3′ UTR are known to form a non-covalent panhandle structure by RNA base-pairing, which allows template recognition by the viral RNA-dependent RNA polymerase (RdRp) in both a sequence- and structure-dependent manner. Accordingly, biological activity requires a precise 5′ UTR and 3′ UTR, tolerating no deviation from the natural sequence (Perez and de la Torre (2003) J Virol 77, 1184-1194). Accordingly, a hypothetical recombination product as depicted in FIG. 1G could not serve as a template for recognition by the viral RdRp and would be biologically inactive. artLCMV not only is genetically stable but also grows well in cell culture (Cheng B Y, et al. (2015) J Virol 89, 7373-7384; Kallert S M, et al. (2017) Nat Commun 8, 15327; Popkin D L, et al. (2011) J Virol 85, 7928-7932). artLCMV therefore was the only tri-segmented arenavirus design amongst the four strategies outlined in FIGS. 1B-1E, which met the specifications 1 and 2 above, i.e. good production yields and genetic stability ensuring safety.

### 2.2 Glycoprotein and Precursors Thereof

[0009] The GP open reading frame encodes three functional protein subunits, which are expressed as one ribosomal translation product. During insertion of the nascending polypeptide into the endoplasmic reticulum (ER) the signal peptide is cleaved off from the subsequent GP1 domain by the signal peptidase. The remainder GP1-GP2 sequence is membrane-inserted and it is post-translationally cleaved into GP1 and GP2 subunits by the subtilisin kexin isozyme-1 (SKI-1)/site 1 protease (SIP) but the GP1 and GP2 domains remain non-covalently associated in the mature glycoprotein complex. Especially noteworthy is the essential nature of the arenavirus GP signal peptide (SP): Unlike most signal peptides which are approximately 20 amino acids in length and are rapidly degraded after signal peptidase cleavage, the arenavirus glycoprotein SPs typically are >50 amino acids long (Eichler R, et al. (2003) FEBS Lett 538, 203-206) and serve not only to insert the GP protein into the ER but they remain associated with the GP1/GP2 complex and are incorporated into mature virions. Furthermore, the arenavirus glycoprotein SP plays an essential role in the post-translational proteolytic cleavage of GP1 from GP2 by SKI-1/SIP. When the arenavirus SP was substituted for a foreign signal peptide in transient transfection experiments, the GP1/GP2 sequence was inserted into the ER, but it failed to undergo processing by SKI-1/SIP (Agnihothram, S S, et al. (2006) J Virol 80, 5189-5198; Eichler R, et al. (2003) EMBO Rep 4, 1084-1088; Schrempf S, et al. (2007) J Virol 81, 12515-12524). GP1/GP2 cleavage by SKI-1/SIP is, however, essential for rendering the glycoprotein complex biologically active (Pinschewer, D D, et al. (2003) Proc Natl Acad Sci USA 100, 7895-7900).

### 2.3 Engineered Arenavirus Particles and Arenavirus Genomic Segments

[0010] Recently, it has been shown that an infectious arenavirus particle can be engineered to contain a genome with the ability to amplify and express its genetic material in infected cells but unable to produce further progeny in normal, not genetically engineered cells (i.e., an infectious, replication-deficient arenavirus particle) (International Publication Nos.: WO 2009/083210 A1, WO 2014/140301 A1 and WO 2015/082570 A1). It has also been shown that a modified arenavirus genomic segment can be engineered to carry a viral ORF in a position other than the wild-type position of the ORF (International Publication No.: WO 2016/075250 A1 and Publication No.: US 2017/0319673 A1). It has further been shown that a modified Pichinde virus genomic segment can be engineered to carry a viral ORF in a position other than the wild-type position of the ORF (International Publication No.: WO 2017/198726 A1 and Publication No.: US 2019/0135875 A1).

[0011] There is an urgent need for compositions, such as the engineered arenavirus particles and related compositions, to be used in vaccines and immunotherapies of various diseases.

### 3. SUMMARY OF THE INVENTION

[0012] Provided herein are nucleotide sequences, arenavirus particles, arenavirus genomic or antigenomic segments, and related compositions. Also provided herein are methods of generating an arenavirus genomic or antigenomic RNA segment, methods of generating an arenavirus particle, and methods of rescuing an arenavirus particle from cDNA or RNA.

[0013] In one aspect provided herein is an engineered arenavirus particle, wherein the genome of the arenavirus particle comprises:
[0014] a) an S segment that encodes (i) an arenavirus GP signal peptide, a buffer peptide, and a first heterologous non-arenaviral polypeptide or (ii) the arenavirus GP signal peptide and the buffer peptide under the control of an arenavirus genomic 3′ UTR and a heterologous non-arenaviral signal peptide, arenavirus GP1 and arenavirus GP2 under the control of an arenavirus genomic 5′ UTR;
[0015] b) an S segment that encodes NP under the control of an arenavirus genomic 3′ UTR and a second heterologous non-arenaviral polypeptide or no polypeptide under the control of an arenavirus genomic 5′ UTR; and
[0016] c) an L segment that encodes the L protein under the control of an arenavirus genomic 3′ UTR and the Z protein under the control of an arenavirus genomic 5′ UTR; or wherein the genome of the arenavirus particle comprises:
[0017] a) an S segment that encodes (i) an arenavirus GP signal peptide, a buffer peptide, and a first heterologous non-arenaviral polypeptide or (ii) the arenavirus GP signal peptide and the buffer peptide under the control of an arenavirus genomic 3′ UTR and a second heterologous non-arenaviral polypeptide or no polypeptide under the control of an arenavirus genomic 5′ UTR;
[0018] b) an S segment that encodes NP under the control of an arenavirus genomic 3′ UTR and a heterologous non-arenaviral signal peptide, arenavirus GP1 and arenavirus GP2 under the control of an arenavirus genomic 5′ UTR; and
[0019] c) an L segment that encodes the L protein under the control of an arenavirus genomic 3′ UTR and the Z protein under the control of an arenavirus genomic 5′ UTR, wherein the first heterologous non-arenaviral polypeptide and the second heterologous non-arenaviral polypeptide are the same or different from each other.

[0020] In some aspects, the buffer peptide comprises or consists of a fragment of the arenavirus GP1. In some aspects, the fragment of the arenavirus GP1 is shorter than the arenavirus GP1. In some aspects, the fragment of the arenavirus GP1 comprises about, at most about, or at least about 1, 2, 3, 4, 5, 10, 15, 20, 25, 30, 35, 40, 45, 50, 55, 60, or more than 60 amino acids of the arenavirus GP1, wherein the fragment of the arenavirus GP1 is the N-terminal fragment of the arenavirus GP1. In some aspects, the buffer peptide comprises about or at most about 1%, 2%, 5%, 10%, 15%, 20%, 25%, 30% basic amino acids. In some aspects, the first 8 N-terminal amino acids of the buffer peptide comprise at most 1, 2, 3, 4, or 5 basic amino acids. In some aspects, the first 5 N-terminal amino acids of the buffer peptide comprise 1, 2, 3, 4, or 5 acidic and/or neutral and/or nonpolar aliphatic amino acids. In some aspects, the first 6 N-terminal amino acids of the buffer peptide comprise 1, 2, 3, 4, 5, or 6 acidic and/or neutral and/or nonpolar aliphatic amino acids. In some aspects, the first 7 N-terminal amino acids of the buffer peptide comprise 1, 2, 3, 4, 5, 6, or 7 acidic and/or neutral and/or nonpolar aliphatic amino acids. In some aspects, the first 8 N-terminal amino acids of the buffer peptide comprise 1, 2, 3, 4, 5, 6, 7, or 8 acidic and/or neutral and/or nonpolar aliphatic amino acids. In some aspects, the last C-terminal amino acid of the buffer peptide is a basic amino acid. In some aspects, the last 2 C-terminal amino acids of the buffer peptide comprise 1 or 2 basic amino acids. In some aspects, the last 3 C-terminal amino acids of the buffer peptide comprise 1, 2, or 3 basic amino acids. In some aspects, the last 4 C-terminal amino acids of the buffer peptide comprise 1, 2, 3, or 4 basic amino acids. In some aspects, the last 5 C-terminal amino acids of the buffer peptide comprise 1, 2, 3, 4, or 5 basic amino acids. In some aspects, the 5 amino acids C-terminal to the first 5, 6, 7, or 8 N-terminal amino acids of the buffer peptide comprises about or at most about 1, 2, or 3 basic amino acids. In some aspects, the buffer peptide does not comprise basic amino acids. In some aspects, the first 3, 4, 5, 6, 7, or 8 N-terminal amino acids of the buffer peptide do not comprise basic amino acids. In some aspects, the buffer peptide comprises about or at least about 50%, 60%, 70%, 80%, 90%, 95%, 96%, 97%, 98%, 99%, or 100% acidic amino acids and/or neutral and/or nonpolar aliphatic amino acids. In some aspects, the first 3, 4, 5, 6, 7, or 8 N-terminal amino acids of the buffer peptide comprise about or at least about 75%, 80%, 85%, 90%, 95%, 96%, 97%, 98%, 99%, or 100% acidic amino acids and/or neutral and/or nonpolar aliphatic amino acids. In some aspects, the buffer peptide is about, at least about, or at most about, 1, 2, 3, 4, 5, 10, 15, 20, 25, 30, 35, 40, 45, 50, 55, 60, 65, 70, or more than 70 amino acids long. In some aspects, any native signal peptide of the first heterologous non-arenaviral polypeptide has been truncated or deleted. In some aspects, the arenavirus GP signal peptide can be cleaved from the buffer peptide or a portion thereof by a signal peptide peptidase. In some aspects, the signal peptide peptidase cleaves immediately N-terminal to the buffer peptide. In some aspects, the signal peptide peptidase cleaves after the first N-terminal amino acid of the buffer peptide. In some aspects, the signal peptide peptidase cleaves after the second N-terminal amino acid of the buffer peptide. In some aspects, the signal peptide peptidase cleaves after the third N-terminal amino acid of the buffer peptide. In some aspects, the signal peptide peptidase cleaves after the fourth N-terminal amino acid of the buffer peptide. In some aspects, the signal peptide peptidase cleaves after the fifth N-terminal amino acid of the buffer peptide.

[0021] In some aspects, any native signal peptide of the second heterologous non-arenaviral polypeptide is retained. In some aspects, the arenavirus GP signal peptide is cleaved at exactly the position where the buffer peptide starts. In some aspects, the arenavirus GP signal peptide is cleaved at amino acid 1, 2, 3, 4, 5, 6, 7, 8, 9, 10, or more than 10 amino acids N-terminal from where the buffer peptide starts. In some aspects, the arenavirus GP signal peptide is cleaved at amino acid 1, 2, 3, 4, 5, 6, 7, 8, 9, 10, or more than 10 amino acids C-terminal from where the buffer peptide starts. In some aspects, the buffer peptide is about, at least about, or at most about, 1, 2, 3, 4, 5, 10, 15, 20, 25, 30, 35, 40, 45, 50, 55, 60, 65, 70, or more than 70 amino acids long.

[0022] In some aspects, the arenavirus particle is derived from an arenavirus of Clade A. In some aspects, the arenavirus of Clade A is Pichinde virus (PICV). In some aspects, the sequence of the arenavirus GP signal peptide, the buffer peptide, and the first heterologous non-arenaviral polypeptide is from N-terminus to C-terminus. In some aspects, the arenavirus GP signal peptide, the buffer peptide, and the first heterologous non-arenaviral polypeptide form a fusion protein. In some aspects, the heterologous non-arenaviral signal peptide is the signal peptide of vesicular stomatitis virus glycoprotein.

[0023] In some aspects, inter-segmental recombination of the two S segments, uniting two arenavirus ORFs on only one instead of two separate S segments, results in a bi-segmented arenavirus that is not viable or that in cell culture reaches peak titers that are lower than or equivalent to the tri-segmented arenavirus from which the bi-segmented arenavirus was recombined. In some aspects, the arenavirus GP1 and arenavirus GP2 comprises an amino acid sequence starting at about amino acid 59 to about 508 of SEQ ID NO:3, or a biologically active fragment thereof. In some aspects, the GP signal peptide fused to the buffer peptide comprises or consists of an amino acid sequence that is about or at least about 95%, 96%, 97%, 98%, 99%, or 100% identical to the sequence of amino acid 1 to amino acid 5, 10, 15, 20, 25, 30, 35, 40, 45, 50, 51, 52, 53, 54, 55, 56, 57, 58, 59, 60, 61, 62, 63, 64, 65, 66, 67, 68, 69, 70, 71, 72, 73, 74, 75, 76, 77, 78, 79, 80, 81, 82, 83, 84, 85, 86, 87, 88, 89, 90, 91, 92, 93, 94, 95, 96, 97, 98, 99, 100, 101, 102, 103, 104, 105, 106, 107, 108, 109, 110, 111, 112, 113, or longer than amino acid 113 of SEQ ID NO:3. In some aspects, the GP signal peptide fused to the buffer peptide comprises or consists of an amino acid sequence that is the sequence of amino acid 1 to amino acid 66 of SEQ ID NO:3. In some aspects, the GP signal peptide fused to the buffer peptide comprises or consists of an amino acid sequence that is the sequence of amino acid 1 to amino acid 81 of SEQ ID NO:3. In some aspects, the GP signal peptide fused to the buffer peptide comprises or consists of an amino acid sequence that is the sequence of amino acid 1 to amino acid 113 of SEQ ID NO:3.

[0024] In some aspects, the GP signal peptide fused to the buffer peptide comprises or consists of an amino acid sequence that is about or at least about 95%, 96%, 97%, 98%, 99%, or 100% identical to the sequence of amino acid 1 to amino acid: 5, 10, 15, 20, 25, 30, 35, 40, 45, 50, 51, 52, 53, 54, 55, 56, 57, 58, 59, 60, 61, 62, 63, 64, 65, 66, 67, 68, 69, 70, 71, 72, 73, 74, 75, 76, 77, 78, 79, 80, 81, 82, 83, 84, 85, 86, 87, 88, 89, 90, 91, 92, 93, 94, 95, 96, 97, 98, 99, 100, 101, 102, 103, 104, 105, 106, 107, 108, 109, 110, 111, 112, 113, or longer than amino acid 113 of SEQ ID NO:6. In some aspects, the GP signal peptide fused to the buffer peptide comprises or consists of an amino acid sequence that is the sequence of amino acid 1 to amino acid 66 of SEQ ID NO:6. In some aspects, the GP signal peptide fused to the buffer peptide comprises or consists of an amino acid sequence that is the sequence of amino acid 1 to amino acid 81 of SEQ ID NO:6. In some aspects, the GP signal peptide fused to the buffer peptide comprises or consists of an amino acid sequence that is about or at least about 95%, 96%, 97%, 98%, 99%, or 100% identical to the sequence of amino acid 1 to amino acid: 5, 10, 15, 20, 25, 30, 35, 40, 45, 50, 51, 52, 53, 54, 55, 56, 57, 58, 59, 60, 61, 62, 63, 64, 65, 66, 67, 68, 69, 70, 71, 72, 73, 74, 75, 76, 77, 78, 79, 80, 81, 82, 83, 84, 85, 86, 87, 88, 89, 90, 91, 92, 93, 94, 95, 96, 97, 98, 99, 100, 101, 102, 103, 104, 105, 106, 107, 108, 109, 110, 111, 112, 113, or longer than amino acid 113 of SEQ ID NO:120. In some aspects the GP signal peptide fused to the buffer peptide comprises or consists of an amino acid sequence that is the sequence of amino acid 1 to amino acid 66 of SEQ ID NO:120. In some aspects the GP signal peptide fused to the buffer peptide comprises or consists of an amino acid sequence that is the sequence of amino acid 1 to amino acid 81 of SEQ ID NO:120.

[0025] In some aspects, the coding sequence of the first heterologous non-arenaviral polypeptide starts at about amino acid 60 or more than about 60 amino acids downstream of the methionine start codon of the GP signal peptide. In some aspects, the first heterologous non-arenaviral polypeptide, the second heterologous non-arenaviral polypeptide, or both heterologous non-arenaviral polypeptides are each an antigen derived from an infectious organism, tumor, or allergen.

[0026] In some aspects, the antigen is selected from the group consisting of viral antigens, wherein the viral antigen is from a virus family selected from the group consisting of adenoviridae, herpesviridae, leviviridae, orthomyxoviridae, parvoviridae, filoviridae, hantaviridae, poxviridae, papillomaviridae, polyomaviridae, paramyxoviridae, pneumoviridae, picornaviridae, reoviridae, retroviridae, flaviviridae, hepadnaviridae, togaviridae, rhabdoviridae, arenaviridae, and coronaviridae; bacterial antigens, wherein the bacterial antigen is from a bacteria family selected from the group consisting of Aquaspirillum family, Azospirillum family, Azotobacteraceae family, Bacteroidaceae family, Bartonellaceae family, Bdellovibrio family, Campylobacteraceae family, Chlamydiaceae family, Clostridiaceae family, Enterobacteriaceae family, Gardinella family, Pasteurellaceae family, Halobacteriaceae family, Helicobacter family, Legionallaceae family, Listeriaceae family, Methylococcaceae family, mycobacteriaceae, Neisseriaceae family, Oceanospirillum family, Pasteurellaceae family, Streptococcaceae family, Pseudomonadaceae family, Rhizobiaceae family, Spirillum family, Spirosomaceae family, Staphylococcaceae family, Helicobacter family, Yersinia family, Bacillus antracis and Vampirovibrio family, and tumor neoantigens or neo-epitopes and tumor associated antigens; and wherein the tumor associated antigen is selected from the group consisting of artificial fusion protein of HPV 16 E7 and E6 proteins, oncogenic viral antigens, cancer-testis antigens, oncofetal antigens, tissue differentiation antigens, mutant protein antigens, Adipophilin, AIM-2, ALDHIAI, BCLX (L), BING-4, CALCA, CD45, CPSF, cyclin DI, DKKI, ENAH (hMcna), Ga733 (EpCAM), EphA3, EZH2, FGF5, glypican-3, G250/MN/CAIX, HER-2/neu, IDOI, IGF2B3, IL13Ralpha2, Intestinal carboxyl esterase, alphafoetoprotein, Kallikrein 4, KIF20A, Lengsin, M-CSF, MCSP, mdm-2, Meloe, MMP-2, MMP-7, MUCI, MUC5AC, p53 (non-mutant), PAX5, PBF, PRAME, PSMA, RAGE, RAGE-I, RGS5, RhoC, RNF43, RU2AS, secernin 1, SOX10, STEAPI (six-transmembrane epithelial antigen of the prostate 1), survivin, Telomerase, VEGF, WT1, EGF-R, CEA, CD20, CD33, CD52, MELANA/MART1, MART2, NY-ESO-1, p53, MAGE A1, MAGE A3, MAGE-4, MAGE-5, MAGE-6, CDK4, alpha-actinin-4, ARTC1, BCR-ABL, BCR-ABL fusion protein (b3a2), B-RAF, CASP-5, CASP-8, beta-catenin, Cdc27, CDK4, CDKN2A, CLPP, COA-1, dek-can fusion protein, EFTUD2, Elongation factor 2, ETV6-AML, ETV6-AML1 fusion protein, FLT3-ITD, FNl, GPNMB, LDLR-fucosyltransferase fusion protein, NFYC, OGT, OS-9, pml-RARalpha fusion protein, PRDX5, PTPRK, H-ras, K-ras (V-Ki-ras2 Kirsten rat sarcoma viral oncogene), N-ras, RBAF600, SIRT2, SNRPD1, SSX, SSX2, SYT-SSXl or -SSX2 fusion protein, TGFbetaRII, Triosephosphate isomerase, ormdm-2, LMP2, HPV E6, HPV E7, EGFRvIII (epidermal growth factor variant III), Idiotype, GD2, ganglioside G2), Ras-mutant, p53 (mutant), Proteinase3 (PRI), Tyrosinase, PSA, hTERT, Sarcoma translocation breakpoints, EphA2, prostatic acid phosphatase PAP, neo-PAP, ML-IAP, AFP, ERG (TMPRSS2 ETS Fusion gene), NAI 7, PAX3, ALK, Androgen Receptor, Cyclin B1, Polysialic acid, MYCN, TRP2, TRP2-Int2, GD3, Fucosyl GMI, Mesothelin, PSCA, sLe(a), cyp1B1, PLACI, GM3, BORIS, Tn, GLoboH, NY-BR-I, SART3, STn, Carbonic Anhydrase IX, OY-TESI, Sperm protein 17, LCK, high molecular weight melanoma-associated antigen (HMWMAA), AKAP-4, SSX2, XAGE 1, B7H3, Legumain, Tie 2, Page4, VEGFR2, MAD-CT-I, FAP, PDGFR-beta, MADCT-2, For-related antigen 1, TRPI, GP100, CA-125, CA19-9, Calretinin, Epithelial membrane antigen (EMA), Epithelial tumor antigen (ETA), CD19, CD34, CD99, CDI 17, Chromogranin, Cytokeratin, Desmin, Glial fibrillary acidic protein (GFAP), gross cystic disease fluid protein (GCDFP-15), HMIB-45 antigen, Myo-D1, muscle-specific actin (MSA), neurofilament, neuronspecific enolase (NSE), placental alkaline phosphatase, synaptophysis, thyroglobulin, thyroid transcription factor-1, dimeric form of the pyruvate kinase isoenzyme type M2 (tumor M2-PK), BAGE BAGE-1, CAGE, CTAGE, FATE, GAGE, GAGE-I, GAGE-2, GAGE-3, GAGE-4, GAGE-5, GAGE-6, GAGE-7, HCA661, HOM-TES-85, MAGEA, MAGEB, MAGEC, NA88, NY-SAR-35, SPANXBI, SPAI 7, SSX, SYCP1, TPTE, Carbohydrate/ganglioside GM2 (oncofetal antigen-immunogenic-1 OFA-I-1), GM3, CA 15-3 (CA 27.29BCAA), CA 195, CA 242, CA 50, CAM 43, CEA, EBNA, EF2, Epstein-Barr virus antigen, HLA-A2, HLA-Al 1, HSP70-2, KIAAO205, MUM-I, MUM-2, MUM-3, Myosin class I, GnTV, Herv-K-mel, LAGE-I, LAGE-2, (sperm protein) SPI 7, SCP-I, P15(58), Hom/Mel-40, E2A-PRL, H4-RET, IGH-IGK, MYL-RAR, TSP-180, P185erbB2, p180erbB-3, c-met, nm-23H1, TAG-72, TAG-72-4, CA-72-4, CAM 17.1, NuMa, 13-catenin, P16, TAGE, CT7, 43-9F, 5T4, 791Tgp72, 13HCG, BCA225, BTAA, CD68KP1, CO-029, HTgp-175, M344, MG7-Ag, MOV18, NB70K, NYCO-1, RCAS1, SDCCAG16, TA-90, TAAL6, TLP, TPS, CD22, CD27, CD30, CD70, prostein, TARP (T cell receptor gamma alternate reading frame protein), Trp-p8, integrin αvβ3 (CD61), galactin, or Ral-B, CD123, CLL-1, CD38, CS-1, CD138, and ROR1.

[0027] In some aspects, the genome of the arenavirus particle encodes the first heterologous non-arenaviral polypeptide and/or the second heterologous non-arenaviral polypeptide; wherein the growth or infectivity of the arenavirus particle is not inferior to a second arenavirus particle; wherein the genome of the second arenavirus particle encodes the same first heterologous non-arenaviral polypeptide and/or the same second heterologous non-arenaviral polypeptide; and wherein all arenaviral GP, NP, Z and L in the second arenavirus particle are each expressed as one ORF.

[0028] In some aspects, the titer of the arenavirus particle is at least about 1%, 2%, 3%, 4%, 5%, 6%, 7%, 8%, 9%, 10%, 15%, 20%, 30%, 40%, 50%, 60%, 70%, 80%, 90%, 100%, 1.5-fold, 2-fold, 3-fold, 4-fold, 5-fold, 6-fold, 7-fold, 8-fold, 9-fold, 10-fold, 12-fold, 15-fold, 18-fold, 20-fold, 25-fold, or 30-fold lower during a persistent infection in AGRAG mice than the titer of the respective wild-type parental arenavirus particle.

[0029] In some aspects, the arenavirus particle expresses a heterologous non-arenaviral polypeptide under control of an arenavirus genomic 3′ UTR; wherein the arenavirus particle induces at least about 1%, 2%, 3%, 4%, 5%, 6%, 7%, 8%, 9%, 10%, 15%, 20%, 30%, 40%, 50%, 60%, 70%, 80%, 90%, 100%, 1.5-fold, 2-fold, 3-fold, 4-fold, 5-fold, 6-fold, 7-fold, 8-fold, 9-fold, 10-fold, 12-fold, 15-fold, 18-fold, 20-fold, 25-fold, or 30-fold higher immune responses against the heterologous non-arenaviral polypeptide in a subject after the arenavirus particle is administered to the subject as compared to after another arenavirus particle expressing the same heterologous non-arenaviral polypeptide under control of an arenavirus genomic 5′ UTR is administered to the subject or to a comparable subject.

[0030] In one aspect provided herein is a set of cDNAs from which the genomic segments of the engineered arenavirus particle of the disclosure can be transcribed. In one aspect provided herein is an expression vector or a set of expression vectors comprising the cDNAs. In one aspect provided herein is a host cell comprising the set of cDNAs or the set of DNA expression vectors.

[0031] Also provided herein is a method of manufacturing the engineered arenavirus particle of the disclosure, comprising maintaining the host cell under conditions suitable for virus formation and harvesting the engineered arenavirus particle. Also provided herein is a pharmaceutical composition comprising the engineered arenavirus particle of the disclosure and a pharmaceutically acceptable carrier. In some aspects, the engineered arenavirus particle of the disclosure is used for treating or preventing a disease in a human patient.

[0032] Also provided herein is a nucleotide sequence comprising an open reading frame encoding a polypeptide consisting of an amino acid sequence that is about or at least about 95%, 96%, 97%, 98%, 99%, or 100% identical to the sequence of amino acid 1 to amino acid 5, 10, 15, 20, 25, 30, 35, 40, 45, 50, 51, 52, 53, 54, 55, 56, 57, 58, 59, 60, 61, 62, 63, 64, 65, 66, 67, 68, 69, 70, 71, 72, 73, 74, 75, 76, 77, 78, 79, 80, 81, 82, 83, 84, 85, 86, 87, 88, 89, 90, 91, 92, 93, 94, 95, 96, 97, 98, 99, 100, 101, 102, 103, 104, 105, 106, 107, 108, 109, 110, 111, 112, 113, or longer than 113 of SEQ ID NO:3. In some aspects, the nucleotide sequence comprises an open reading frame encoding a polypeptide consisting of amino acid 1 to 66 of SEQ ID NO:3. In some aspects, the nucleotide sequence comprises an open reading frame encoding a polypeptide consisting of amino acid 1 to 81 of SEQ ID NO:3. In some aspects, the nucleotide sequence comprises an open reading frame encoding a polypeptide consisting of amino acid 1 to 113 of SEQ ID NO:3.

[0033] In one aspect provided herein is a method of immunizing a subject suspected of having, diagnosed with, or at risk of developing a disease or disorder, comprising: a. administering a first engineered arenavirus particle to the subject, and b. administering a second engineered arenavirus particle to the subject, wherein the first engineered arenavirus particle is derived from a first arenavirus species and the second engineered arenavirus particle is derived from a second arenavirus species.

[0034] In some aspects provided herein, the first engineered arenavirus particle and the second engineered arenavirus particle are derived from the same arenavirus species. In some aspects provided herein, the first engineered arenavirus particle and the second engineered arenavirus particle are derived from different arenavirus species. In some aspects provided herein, the same arenavirus species is PICV. In some aspects provided herein, the same arenavirus species is LCMV. In some aspects provided herein, the same arenavirus species is Tamiami virus (TAMV). In some aspects provided herein, the same arenavirus species is Tacaribe virus (TCRV). In some aspects provided herein, the first arenavirus species is LCMV and the second arenavirus species is PICV. In some aspects provided herein, the first arenavirus species is PICV and the second arenavirus species is LCMV. In some aspects provided herein, the first arenavirus species is LCMV and the second arenavirus species is TAMV. In some aspects provided herein, the first arenavirus species is TAMV and the second arenavirus species is LCMV. In some aspects provided herein, the first arenavirus species is LCMV and the second arenavirus species is TCRV. In some aspects provided herein, the first arenavirus species is TCRV and the second arenavirus species is LCMV. In some aspects provided herein, the first arenavirus species is TAMV and the second arenavirus species is PICV. In some aspects provided herein, the first arenavirus species is PICV and the second arenavirus species is TAMV. In some aspects provided herein, the first arenavirus species is TCRV and the second arenavirus species is PICV. In some aspects provided herein, the first arenavirus species is PICV and the second arenavirus species is TCRV. In some aspects provided herein, the first arenavirus species is TCRV and the second arenavirus species is TAMV. In some aspects provided herein, the first arenavirus species is TAMV and the second arenavirus species is TCRV. In some aspects provided herein, the disease or disorder is an infection. In some aspects provided herein, the disease or disorder is a cancer.

### 3.1 Definitions

[0035] As used herein and unless otherwise indicated, the term “GP” means both the arenavirus glycoprotein and any arenavirus glycoprotein precursor. In an exemplary embodiment, the arenavirus glycoprotein precursor can be post-translationally cleaved into a signal peptide, GP1 and GP2. In certain embodiments, the arenavirus glycoprotein or any arenavirus glycoprotein precursor may be wild-type. In other embodiments, the arenavirus glycoprotein or any arenavirus glycoprotein precursor may be recombinant. GP is further described in Section 5.1.

[0036] As used herein and unless otherwise indicated, the term “NP” means both the arenavirus nucleoprotein and any arenavirus nucleoprotein precursor. In certain embodiments, the arenavirus nucleoprotein or any arenavirus nucleoprotein precursor may be wild-type. In other embodiments, the arenavirus nucleoprotein or any arenavirus nucleoprotein precursor may be recombinant. NP is further described in Section 5.1.

[0037] As used herein and unless otherwise indicated, the term “Z” means both the arenavirus Z protein and any arenavirus Z protein precursor. In certain embodiments, the arenavirus Z protein or any arenavirus Z protein precursor may be wild-type. In other embodiments, the arenavirus Z protein or any arenavirus Z protein precursor may be recombinant. Z is further described in Section 5.1.

[0038] As used herein and unless otherwise indicated, the term “L” means both the arenavirus L protein and any arenavirus L protein precursor. In certain embodiments, the arenavirus L protein or any arenavirus L protein precursor may be wild-type. In other embodiments, the arenavirus L protein or any arenavirus L protein precursor may be recombinant. L is further described in Section 5.1.

[0039] As used herein and unless otherwise indicated, the term “functional fragment” means a fragment of a polypeptide. The functional fragment of a polypeptide as described herein is not the full-length polypeptide. In certain embodiments, the functional fragment may possess one or more functions that is known to a person of ordinary skills in the art. In certain embodiments, the functional fragment may possess the biological functions of the polypeptide from which the functional fragment is derived. In an exemplary embodiment, the functional fragment may be a signal peptide that possesses a function of mediating the insertion of glycoprotein precursor into the membrane of the endoplasmic reticulum (ER). In further embodiments, besides the function of mediating the insertion of glycoprotein precursor into the membrane of the ER, the signal peptide may possess other functions, for example mediating cleavage of the polypeptide and/or acting as a trans-acting maturation factor. In other embodiments, the functional fragment may not possess any function that is known to a person of ordinary skills in the art. Functional fragment is further described in Section 5.2.

[0040] As used herein and unless otherwise indicated, the term “heterologous non-arenaviral polypeptide” means a polypeptide that is not of arenavirus origin. In certain embodiments, the heterologous non-arenaviral polypeptide is a reporter protein (see Section 5.3.1). In other embodiments, the heterologous non-arenaviral polypeptide is a signal peptide (see Section 5.3.2). In other embodiments, the heterologous non-arenaviral polypeptide is an antigen (see Section 5.3.3)

[0041] As used herein and unless otherwise indicated, the term “buffer peptide” refers to an amino acid sequence following the GP signal peptide as encoded by a viral genomic segment described herein. A buffer peptide can be 1 amino acid or more than one amino acid long. A buffer peptide can be between about 1 to about 5 amino acids, about 1 to about 10 amino acids, about 1 to about 20 amino acids, about 1 to about 30 amino acids, about 1 to about 40 amino acids, about 1 to about 50 amino acids, about 1 to about 60 amino acids, about 1 to about 70 amino acids, about 1 to about 80 amino acids, about 1 to about 90 amino acids, about 1 to about 100 amino acids, about 1 to about 110 amino acids, about 1 to about 120 amino acids, about 1 to about 130 amino acids, about 1 to about 140 amino acids, about 1 to about 150 amino acids, about 1 to about 160 amino acids, about 1 to about 170 amino acids, about 1 to about 180 amino acids, about 1 to about 190 amino acids, about 1 to about 200 amino acids, or about 1 to more than about 200 amino acids long. In some embodiments, a buffer peptide is about, at least about, or at most about 1, 2, 3, 4, 5, 6,7, 8, 9, 10, 11, 12, 13, 14, 15, 16, 17, 18, 19, 20, 21, 22, 23, 24, 25, 26, 27, 28, 29, 30, 31, 32, 33, 34, 35, 36, 37, 38, 39, 40, 41, 42, 43, 44, 45, 46, 47, 48, 49, 50, 51, 52, 53, 54, 55, 56, 57, 58, 59, 60, 61, 62, 63, 64, 65, 66, 67, 68, 69, 70, 71, 72, 73, 74, 75, 76, 77, 78, 79, 80, 81, 82, 83, 84, 85, 86, 87, 88, 89, 90, 91, 92, 93, 94, 95, 96, 97, 98, 99, 100, 105, 110, 115, 120, 125, 130, 135, 140, 145, 150, 155, 160, 165, 170, 175, 180, 185, 190, 195, 200, or more than about 200 amino acids long. Without being bound by theory, a buffer peptide can increase the cleavage efficiency by a peptidase at the cleavage site following the GP signal peptide. Buffer peptides are further described in Section 5.4. Specifically, the amino acid composition and examples are described in Sections 5.4 and 6.

[0042] The term “about” indicates and encompasses an indicated value and a range above and below that value. In certain embodiments, the term “about” indicates the designated value±1000, ±500, or ±100. In certain embodiments, the term “about” indicates the designated value ±one standard deviation of that value.

[0043] As used herein, the singular forms “a,” “an,” and “the” ˜ include the plural referents unless the context clearly indicates otherwise.

### 3.2 Conventions and Abbreviations

| Abbreviation | Convention |
|---|---|
| art | Artificial |
| CAT | Chloramphenicol acetyltransferase |
| CMI | cell-mediated immunity |
| CD8 | Cluster of differentiation 8 |
| CD4 | Cluster of differentiation 4 |
| ER | Endoplasmic reticulum |
| GFP | Green fluorescent protein |
| GP | Glycoprotein and precursors thereof |
| GP1 | Glycoprotein-1 subunit |
| GP2 | Glycoprotein-2 subunit |
| h.p. | heterologous non-arenaviral polypeptide |
| IGR | Intergenic region |
| JUNV | Junin virus |
| LCMV | Lymphocytic choriomeningitis virus |
| L | L protein and precursors thereof |
| L protein | RNA-dependent RNA polymerase |
| L segment | Long segment |
| MHC | Major Histocompatibility Complex |
| Z | Matrix protein Z and precursors thereof |
| Z protein | Matrix protein Z |
| nat | Natural |
| NP | Nucleoprotein and precursors thereof |
| ORF | Open reading frame |
| PICV | Pichinde virus |
| RFP | Red fluorescent protein |
| r2JUNV | Recombinant bi-segmented JUNV |
| r3JUNV | Recombinant tri-segmented JUNV |
| r2LCMV | Recombinant bi-segmented LCMV |
| r3LCMV | Recombinant tri-segmented LCMV |
| S segment | Short segment |
| S1P | Site 1 protease |
| SKI-1 | Subtilisin kexin isozyme-1 |
| SP | Signal peptide |
| TOM | Tomato (red fluorescent protein) |
| UTR | Untranslated region |
| VSV | Vesicular Stomatitis Virus |
| wt | Wild-type |
| ALLV | Allpahuayo virus |
| AMAV | Amapari virus |
| MOBV | Mobala virus |
| MOPV | Mopeia virus |
| FLEV | Flexal virus |
| GTOV | Guanarito virus |
| LATV | Latino virus |
| MACV | Machupo virus |
| BCNV | Bear Canyon virus |
| PARV | Parana virus |
| PIRV | Pirital virus |
| SABV | Sabiá virus |
| TAMV | Tamiami virus |
| TCRV | Tacaribe virus |
| WWAV | Whitewater Arroyo virus |
| IPPV | Ippy virus |
| ALXV | Alxa virus |
| BCNV | Bear Canyon virus |
| SBAV | Sabia virus |
| CHAPV | Chapare virus |
| LIJV | Lìjiāng virus |
| CUPXV | Cupixi virus |
| GAIV | Gairo virus |
| LORV | Loei River virus |
| LUJV | Lujo virus |
| LUAV | Luna virus |
| LULV | Luli virus |
| LNKV | Lunk virus |
| MRLV | Mariental virus |
| MRWV | Merino Walk virus |
| MORV | Morogoro virus |
| OKAV | Okahandja virus |
| PRAV | Paraná virus |
| APOV | Aporé virus |
| RYKV | Ryukyu virus |
| SOLV | Solwezi virus |
| SOUV | souris virus |
| TMMV | Tamiami virus |
| WENV | Wēnzhōu virus |
| BBRTV | Big Brushy Tank virus |
| CTNV | Catarina virus |
| SKTV | Skinner Tank virus |
| TTCV | Tonto Creek virus |
| XAPV | Xapuri virus |
| SSP | Stable signal peptide |

### 4. BRIEF DESCRIPTION OF THE FIGURES

[0045] FIGS. 1A-1G: Published tri-segmented arenavirus vector genome design strategies, and molecular mechanism underlying r3LCMV phenotypic reversion and genetic stability of artLCMV. FIGS. 1A-1E show the schematic of the RNA segments forming the genomes of wild type LCMV (FIG. 1A), r3LCMV (FIG. 1), artLCMV (FIG. 1C), r3LCMVrev (FIG. 1D) and artLCMVrev (FIG. 1E). Segment denominations are boxed and indicated in bold. UTR: untranslated region; IGR: intergenic region; ORFs are indicated by arrows. GPC: full-length glycoprotein ORF (including the natural signal peptide); NP: nucleoprotein; L: RNA-dependent RNA polymerase L; Z: Matrix protein; h.p.: heterologous non-arenaviral polypeptide. FIG. 1F shows a non-homologous inter-segmental RNA recombination event re-uniting NP and GPC on one RNA segment (Kallert S M, et al. (2017) Nat Commun 8, 15327). This process underlies the spontaneous reversion of r3LCMV to a bi-segmented viral genome with wildtype-like virulence. FIG. 1G shows a hypothetical recombination event in artLCMV reuniting GPC and NP on one single RNA segment, which is devoid of a 5′ UTR and thus lacks a functional viral promoter (Kallert S M, et al. (2017) Nat Commun 8, 15327).

[0046] FIG. 2: The output of the online tool PrediSi (Prediction of SIgnalpeptides) website (from the Technical University of Braunschweig) analyzing the PICV glycoprotein sequence is shown.

[0047] FIGS. 3A-3C: Schematic of the genomic RNA segments of PICV wildtype, PICV-Split58-(TOM/GFP) and PICV-Split59-(TOM/GFP). The length of the SSP and of the GP1/2 is indicated by the amino acids as counted in the full-length PICV-GP ORF.

[0048] FIG. 4: Schematic of the expression cassettes contained in the bacterial plasmids pol-I-L, pol-I-S1, pol-I-S2, pC-L and pC-NP, which were used to generate tri-segmented arenavirus vectors. Pol-I-P: murine polymerase I promoter; G: non-template G residue in the 5′ end of arenavirus genomes; 5′UTR: genomic 5′ untranslated region; IGR: intergenic region; 3′UTR: genomic 3′ untranslated region; pol-I-T: murine polymerase I terminator; S1 and S2: genetically engineered S segments as designed for each trisegmented vector; Act-P: Chicken beta-actin promoter; CMV-Enh: cytomegalovirus enhancer; intron: artificially introduced intron; poly-A: polyadenylation signal.

[0049] FIGS. 5A-5C: BHK-21 cells stably expressing the LCMV glycoprotein (BHK-23 cells) were transfected with the plasmids as schematically depicted in FIG. 4 and expressing viral genomic segments as described in FIGS. 3B-3C. FIG. 5A: Fluorescence microscopy images of cells transfected to rescue PICV-Split59-(TOM/GFP) imaged on day 6 after transfection. FIG. 5B: Vector titers on day 7 after transfection were determined on 3T3 and 293T-GP cells as indicated. FIG. 5C: Fresh BHK-21 cells were infected with the indicated vectors at multiplicity of infection (MOI) of 0.01 and replication-competent vector titers were determined on 3T3 cells at the indicated time points. Symbols represent the mean of three independent cell culture wells.

[0050] FIGS. 6A-6D: Schematic of the genomic RNA segments of PICV-Split58-(TOM/E7E6), PICV-Split59-(TOM/E7E6) and of artPICV-(TOM/E7E6) (FIGS. 6A-6C). FIG. 6D: BHK-23 cells were transfected with the plasmids as schematically depicted in FIG. 4 and expressing viral genomic segments as described FIGS. 6A-6C, respectively. Vector titers on day 9 after transfection were determined on 3T3 and 293T-GP cells as indicated.

[0051] FIGS. 7A-7C: FIG. 7A shows the schematic of the (glycoprotein-expressing) S1 segments of PICV-Split58-(TOM/GFP), PICV-Split59-(TOM/GFP), PICV-Split58-(TOM/E7E6) and PICV-Split59-(TOM/E7E6) in comparison to the PICV wildtype S segment. FIG. 7B shows the alignment of the N-terminus of PICV-GP with the SSP-GFP and SSP-E7E6 fusion proteins as follows: SSP(Aa1-58)-GFP expressed by PICV-Split58-(TOM/GFP), SSP(Aa1-59)-GFP expressed by PICV-Split59-(TOM/GFP), SSP(Aa1-58)-E7E6 expressed by PICV-Split58-(TOM/E7E6), and SSP(Aa1-59)-E7E6 expressed by PICV-Split59-(TOM/E7E6). FIG. 7C shows the enlargement of the sequence alignment from Aa59 Aa69. Letters indicate single-letter amino acid codes.

[0052] FIGS. 8A-8H: BHK-21 cells stably expressing the LCMV glycoprotein (BHK-23 cells) were transfected with the plasmids as schematically depicted in FIG. 4 and expressing viral genomic segments as described in each respective figure panel. Vector titers on day 7 and on day 9 after transfection were determined on 3T3 and 293T-GP cells as indicated.

[0053] FIGS. 9A-9F: BHK-21 cells were infected with the indicated viruses (vector genomes schematically depicted in FIG. 8A-H) at MOI of 0.001 (FIGS. 9A-9C) or at MOI of 0.01 (FIGS. 9D-9F). Supernatant was collected at the indicated time points and replication-competent vector titers were determined on 3T3 cells. Symbols represent the mean of two independent cell culture wells.

[0054] FIGS: 10A-1OD: BHK-21 cells were infected with the indicated viruses (vector genomes schematically depicted in FIG. 8A-H) at MOI of 0.001 (FIGS. 10A-10C) or at MOI of 0.01 (FIGS. 10D-10F). Supernatant was collected at the indicated time points and replication-competent vector titers were determined on 3T3 cells. Symbols represent the mean of two independent cell culture wells. The same results as displayed in FIG. 9A-F are shown, but grouped differently.

[0055] FIGS. 11A-11F: C57BL/6 mice were intravenously infected with 10E5 FFU of the vectors schematically displayed in FIGS. 11A-11C. Blood was collected on day eight (8) and the frequency of E749-57-specific (RAHYNIVTF) CD8 T cells was determined by H-2D^{b} dextramer staining (FIG. 11D). PICV nucleoprotein-specific CD8 T cells binding to H-2K^{b}dextramers loaded with the NP38-45 epitope (SALDFHKV) were also determined (FIG. 11E). The values plotted in FIGS. 11D and 11E were used to calculate E7 epitope dominance by dividing for each individual animal the frequency of E749-57-specific CD8+ T cells by the frequency of NP38-45-specific CD8+ T cells. The differences between the groups were determined by one-way ANOVA followed by Bonferroni's post-test using GraphPad Prism software.

[0056] FIG. 12: Schematic of the LCMV wildtype virus genome in comparison to the genome of LCMV-Split58 vectors expressing two heterologous non-arenaviral polypeptides. The length of the SSP and of the GP1/2 is indicated by the amino acids as counted in the full-length LCMV-GP ORF.

[0057] FIGS. 13A-13C: BHK-21 cells stably expressing the LCMV glycoprotein (BHK-23 cells) were transfected with the plasmids as schematically depicted in FIG. 4 and expressing viral genomic segments as described in FIG. 12 encoding full length TRP2 as a heterologous non-arenaviral polypeptide on both S segments. Subsequently, vector supernatants were titrated to determine infectious titer on 293T-GP cells (FFU) or replication competent virus titer on adherent HEK293 cells (RCV FFU). To generate vector stock material, HEK293 suspension cells were infected at MOI of 0.01 and supernatants harvested four days later. FIG. 13A: Vector titers of 12 (LCMV-Split58-(TRP2/TRP2)—bars with “*” symbol) and 6 (LCMV-Split58-(TRP2/TRP2_delSP)—bars with “#” symbol) individual rescue cultures, respectively, were determined on day 6 post transfection. Shown are arithmetic means (+/−STD deviation). FIG. 13B: Vector titers of 6 (LCMV-Split58-(TRP2/TRP2)—bars with “*” symbol) and 3 (LCMV-Split58-(TRP2/TRP2_delSP)—bars with “#” symbol) individual vector stocks (p1), respectively, were determined on day 4 post infection at MOI 0.01. FIG. 13C: Genetic stability of the TRP2 transgene was determined by RT-PCR of stock material (p1) and subsequent passage (p2), targeting either the S1-encoded (TRP2-GP; TRP2_delSP-GP) or the S2-encoded (TRP-NP) transgenes, respectively. Shown are exemplary replicates (labelled “1”, “2”, “3”, next to marker lanes “M”) for each vector. Expected PCR amplicon size 1939 bp for full-length TRP2 and 1870 bp for TRP2_delSP. Stars indicate PCR amplicons of shorter than expected size, indicating deletions in the respective transgene.

[0058] FIGS. 14A-14B: Sequence analysis of the TRP2 transgene region revealed various nucleotide exchanges within or in close proximity to the TRP2 signal peptide. Stock material (p1) of two LCMV-Split58-(TRP2/TRP2) vectors encoding the full-length TRP2 transgene on both S segments was used for Sanger consensus sequence analysis. Prior to sequencing, transgene integrity of both vectors was confirmed by a transgene-spanning RT-PCR amplification and amplicon size analysis by gel electrophoresis. FIG. 14A: Schematic of detected mutations within the N-terminal region of the TRP2 transgene. FIG. 14B: results of SignalP for cleavage probability of mutated TRP2 versions relative to the original TRP2 sequence.

[0059] FIGS. 15A-15B: Deletion of internal signal peptides of PSA and GP70 increases vector rescue and stock titers. LCMV-Split58 vectors encoding full length PSA or GP70 (i.e., LCMV-Split58-(PSA/PSA), LCMV-Split58-(GP70/GP70)) as well as vectors encoding full length PSA or GP70 on their S2 segments and PSA and GP70 without the respective native signal peptide (_delSP) on their S1 segments (i.e., LCMV-Split58-(PSA/PSA_delSP), LCMV-Split58-(GP70/GP70_delSP)), were generated by transfection of BHK-21 cells stably expressing the LCMV glycoprotein (BHK-23 cells) with the plasmids as shown in FIG. 4. Subsequently, vector supernatants were titrated to determine infectious titer on 293TVL cells (FFU) or replication competent virus titer on adherent HEK293 (RCV FFU). To generate vector stock material, HEK293 suspension cells were infected at MOI of 0.01. FIG. 15A: Vector titers of 3 individual rescues, respectively, were determined on day 6 post transfection. Shown are arithmetic means (+/−STD deviation). FIG. 15B: Vector titers of 3 individual vector stocks (p1), respectively, were determined on day 4 post infection at MOI of 0.01.

[0060] FIG. 16: PICV-Split59-vectors exhibit a very low rescue efficiency. BHK-21 cells stably expressing the LCMV glycoprotein (BHK-23 cells) were transfected with the plasmids as schematically depicted in FIG. 4 and expressing viral genomic segments encoding E7E6 and/or Trp2 and/or Trp2delSP on the S2 and S1 segments (indicated in the table as “S2-encoded transgene”/“S1-encoded transgene”). Rescue efficiencies of the individual vectors with the indicated transgene payload were calculated by dividing the number of RCV titer-positive rescues by the number of total rescues (=technical repeats) performed. Data from several independent experiments were combined.

[0061] FIGS. 17A-17B: An arenavirus signal peptide of 59 amino acids in length (SSP_59Aa) yields replication-competent PICV-Split vectors. RCV titer-positive rescue culture supernatants from the experiment reported in FIG. 16 were titrated to determine replication competent virus titer on adherent HEK293 cells (RCV FFU). To generate vector stock material (p1), HEK293 suspension cells were infected at MOI of 0.001 and supernatants were harvested three days later. FIG. 17A: Vector titers of 4 (artPICV, PICV-Split58) or 3 (PICV-Split59) and 2 (PICV-Split59-TRP2_delSP) individual rescues, respectively, were determined on day 7 post transfection. Shown are arithmetic means (+/−STD deviation). FIG. 17B: Vector titers of individual vector stocks (p 1), were determined on day 3 post infection at MOI 0.001. Shown are arithmetic means (+/−STD deviation). “N.A.”: not assessed. “Below LOD”: below level of detection.

[0062] FIGS. 18A-18F: Genome organization of Split-A, Split-B, Split-C, Split-D, Split-E and Split-F vector genomes and their X and Y variants. FIGS. 18A-4F shows the schematic description of the genome organizations of Split-A (FIG. 18A), Split-B (FIG. 18B), Split-C (FIG. 18C), Split-D (FIG. 18D), Split-E (FIG. 18E) and Split-F (FIG. 18F) vector genomes, each expressing two heterologous non-arenaviral polypeptides (“h.p.”), which may be the same or different from each other. X and Y variants (Split-Ax, Split-Ay, Split-Bx, Split-By etc.) carrying a transgene at only one of two possible sites are described for each one of the genome organizations displayed in FIGS. 18A-18F. FIGS. 18A-18F are provided for illustration purposes of Split-A, Split-B, Split-C, Split-D, Split-E and Split-F vector genomes and do not show a buffer peptide. However, the same genomic organizations as shown in this figure can be used including a buffer peptide as described herein.

[0063] FIGS. 19A-19D: BHK-21 cells stably expressing the LCMV glycoprotein (BHK-23 cells) were transfected with the plasmids as schematically depicted in FIG. 4 and expressing viral genomic segments as described in each respective figure panel (FIGS. 19A-19D). Vector titers on day 6 after transfection were determined on 3T3 and 293T-GP cells as indicated.

[0064] FIGS. 20A-20E: BHK-21 cells were infected with the vectors PICV-Split59-(TOM/Trp2), PICV-Split66-(TOM/Trp2), PICV-Split81-(TOM/Trp2) and PICV-Split113-(TOM/Trp2) consisting of the genome segments as schematically depicted in FIGS. 20A-20D. Samples were collected at the indicated time points and replication-competent infectious vector titers (RCV-FFU) were determined in a focus formation assay on 3T3 cells (FIG. 20E). Symbols represent the mean+/−SD of three cell culture wells.

[0065] FIGS. 21A-21C: FIG. 21A shows the schematic of the (glycoprotein-expressing) S1 segments of PICV-Split58-(TOM/GFP), PICV-Split59-(TOM/GFP), PICV-Split58-(TOM/E7E6), PICV-Split59-(TOM/E7E6) and PICV-Split59-(TOM/Trp2) in comparison to the PICV wildtype S segment. FIG. 21B shows the alignment of the N-terminus of PICV-GP with the SSP-GFP, SSP-E7E6 and SSP-Trp2-delSP fusion proteins as follows: SSP(Aa1-58)-GFP expressed by PICV-Split58-(TOM/GFP), SSP(Aa1-59)-GFP expressed by PICV-Split59-(TOM/GFP), SSP(Aa1-58)-E7E6 expressed by PICV-Split58-(TOM/E7E6), SSP(Aa1-59)-E7E6 expressed by PICV-Split59-(TOM/E7E6) and SSP(Aa1-59)-Trp2delSP expressed by PICV-Split59-(TOM/Trp2). FIG. 21C shows the enlargement of the sequence alignment from Aa59-Aa69. Letters indicate single-letter amino acid codes. Various constructs differ substantially in the amino acid sequence that follows C-terminally after the signal peptide—GP1 cleavage site (indicated by an arrow), resulting in differential biochemical properties including charge of the protein sequence.

[0066] FIGS. 22A-22B: FIG. 22A shows a schematic of the genomic segments of PICV-Split66-(TOM/E7E6) and variants thereof with their S1 segment differing in amino acid positions 60 and 61 of the SSP-E7E6 gene. WT denotes the amino acid sequence of the wildtype N-terminus of PICV-GP (methionine at positions 60 and 61), whereas the DD-, EE-, GG-, LL-, HH- and KK-variants denote variants encoding for the corresponding amino acids (single letter code) instead of methionine at positions 60 and 61. FIG. 22B shows the infectious replication-competent titer (RCV-FFU) of these various viruses at 24 hours after infection of BHK-21 cells at multiplicity of infection (MOI) of 0.01. RCV-FFU were determined by immunofocus assay on 3T3 cells. Symbols represent individual cell culture wells, the mean is indicated by a horizontal line.

[0067] FIGS. 23A-23D: Schematics of the genomes of Tacaribe virus- (TCRV-) based TCRV-Split58-(TOM/E7E6), TCRV-Split66-(TOM/E7E6), and TCRV-Split81-(TOM/E7E6) vectors are shown in FIGS. 23A-23C. BHK-21 cells were infected with either of these vectors at MOI=0.01 and infectious replication-competent titers in the supernatant were determined over time by immunofocus assay on adherent 293T cells (FIG. 23D). Symbols represent the mean+/−SD of two cell culture wells.

[0068] FIGS. 23E-23H: Schematics of the genomes of Tamiami virus- (TAMV-) based TAMV-Split58-(GFP/GFP), TAMV-Split66-(GFP/GFP) and TAMV-Split81-(GFP/GFP) vectors are shown in FIGS. 23E-23G. BHK-21 cells were infected with either of these vectors at MOI=0.001 and infectious replication-competent titers in the supernatant were determined over time by immunofocus assay on VERO cells (FIG. 23H). Symbols represent the mean+/−SD of two cell culture wells.

[0069] FIGS. 24A-24C: Schematics of the genomic organization of LCMV-Split-(GFP/E7E6), artLCMV-(GFP/E7E6), PICV-Split66-(TOM/E7E6) and artPICV-(TOM/E7E6) are shown in FIG. 24A. C57BL/6 mice were immunized intravenously (i.v.) with 10e5 RCV-FFU of the aforementioned vectors in heterologous prime boost combinations as indicated in the chart shown in FIGS. 24B-24C. MHC class I dextramers were used to enumerate over time in peripheral blood of the animals HPV E6-specific CD8 T cells recognizing the E648-57 epitope (EVYDFAFRDL) in the context of H-2Kb (FIG. 24B) and HPV E7-specific CD8 T cells recognizing the E749-57 epitope (RAHYNIVTF) in the context of H-2db (FIG. 24C). Specific CD8 T cell frequencies in peripheral blood were determined after gating on CD8+B220− lymphocytes. Symbols represent the mean+/−SD of three mice per group. Two-way ANOVA was performed to compare the different immunization regimens. **: p<0.01.

[0070] FIGS. 25A-25C: Schematics of the genomic organization of LCMV-Split-(GFP/E7E6), artLCMV-(GFP/E7E6), PICV-Split66-(TOM/E7E6), PICV-Split81-(TOM/E7E6) and artPICV-(TOM/E7E6) are shown in FIG. 25A. C57BL/6 mice were immunized intravenously (i.v.) with 10e5 RCV-FFU of the aforementioned vectors in heterologous prime boost combinations as indicated in the chart shown in FIGS. 25B-25C. MHC class I dextramers were used to enumerate over time in peripheral blood of the animals HPV E7-specific CD8 T cells recognizing the E749-57 epitope (RAHYNIVTF) in the context of H-2db (FIG. 25B). Symbols in FIG. 25B represent the mean+/−SD of four mice per group. On day 148 of the experiment the animals were sacrified and spleen cell suspensions were prepared to determine the frequencies of E6- and E7-specific CD8 T cells. Intracellular cytokine assays were performed after restimulation with overlapping peptide sets spanning the respective proteins. The frequency of IFN-g-, TNF-a- and IL-2-secreting cells amongst CD8+B220− lymphocytes is shown. Symbols in FIG. 25C represent individual mice, means are shown as bars. Statistical comparisons were performed by one-way ANOVA with Dunnett's post-test. **: p<0.01; *: p<0.05.

[0071] FIGS. 26A-26C: Proteins extracted from purified artPICV virions were digested with chymotrypsin for mass spectrometry-based peptide identification. FIG. 26A shows selected peptide search engine results (PULSAR search engine, Biognosys AG) for semi-specific chymotryptic peptides F.LILAGRSC[Carbamidomethyl]DG.M (left) and L.ILAGRSC[Carbamidomethyl]DG.M (right). PEP.Q values are indicated in FIG. 26A. FIG. 26B displays MS2 extracted ion chromatograms of both, peptides F.LILAGRSC[Carbamidomethyl]DG.M (left, “peptide 1”) and L.ILAGRSC[Carbamidomethyl]DG.M (right, “peptide 2”) determined by directDIA analysis (SpectroNaut, Biognosys AG). Chymotrypsin cleaves after large hydrophobic amino acids (tyrosine, tryptophane and phenylalanine; single letter codes Y, W, F, respectively) and after leucine (single letter codes L) but virtually never after glycine (single letter code G). Accordingly, the N-terminus of the identified peptides is readily explained by chymotrypsin cleavage after F and L, respectively, whereas the same cannot apply for their C-terminus consisting of a G residue. The C-terminal G59 residue of the two independently identified peptides 1 and 2 corresponds, therefore, to the naturally processed C-terminus of the PICV glycoprotein signal peptide (FIG. 26C).

### 5. DETAILED DESCRIPTION OF THE INVENTION

[0072] Provided herein are arenavirus particles that are genetically stable and provide a high-level transgene expression. In certain embodiments, the arenavirus particles are tri-segmented. Also provided herein are nucleotide sequences and arenavirus genomic or antigenomic segments related to such arenavirus particles. In certain embodiments, provided herein is a nucleotide sequence (see Section 5.5) comprising one or more ORFs comprising a nucleotide sequence encoding a functional fragment (see Section 5.2) of arenavirus GP, NP, L or Z, and a buffer peptide (see Section 5.1) and/or a heterologous non-arenaviral polypeptide (see Section 5.3). In certain embodiments, provided herein is an arenavirus particle engineered such that an arenaviral ORF is separated over two or more mRNA transcripts (see Section 5.6). In certain embodiments, provided herein is an arenavirus genomic or antigenomic segment engineered such that the transcription thereof results in one or more mRNA transcripts comprising a nucleotide sequence encoding a functional fragment of arenavirus GP (such as the GP signal peptide and a buffer peptide as described in Section 5.4), NP, L or Z (see Section 5.7). In certain embodiments, the arenavirus particles provided herein are genetically stable, i.e. do not revert to wild-type-like (more virulent) replication behavior in the host (genetic stability) (see Section 5.14). In certain embodiments, the arenavirus particles provided herein may show high-level transgene expression to elicit strong immune responses against the desired target antigen(s) (transgene expression levels) (see Section 5.14). In certain embodiments, the arenavirus particles provided herein may show good growth in cell culture, enabling the arenavirus particle's production to high titers in industrial fermentation processes (production yields) (see Section 5.14). In certain embodiments, the arenavirus particles provided herein may be suitable for vaccines, treatment of diseases, and/or for the use in immunotherapies (see Sections 5.12 and 5.13).

[0073] Arenaviruses for use with the methods and compositions provided herein can be Old World viruses such as, for example, Lassa virus, Lymphocytic choriomeningitis virus (LCMV), Mobala virus, Mopeia virus, or Ippy virus, or New World viruses such as, for example, Amapari virus, Flexal virus, Guanarito virus, Junin virus, Latino virus, Machupo virus, Oliveros virus, Parana virus, Pichinde virus, Pirital virus, Sabia virus, Tacaribe virus, Tamiami virus, Bear Canyon virus, Allpahuayo virus (ALLV), or Whitewater Arroyo virus. Arenaviruses for use with the methods and compositions provided herein can be, for example, arenaviruses, mammarenaviruses, Old World mammarenaviruses, New World mammarenaviruses, New World mammarenaviruses of Clade A, New World mammarenaviruses of Clade B, New World mammarenaviruses of Clade C, or New World mammarenaviruses of Clade D. Arenaviruses for use with the methods and compositions provided herein can be a mammarenavirus including, but not limited to, Allpahuayo virus, Alxa virus, Junin virus, Bear Canyon virus, Sabia virus, Pichinde virus, Chapare virus, Lijiang virus, Cupixi virus, Flexal virus, Gairo virus, Guanarito virus, Ippy virus, Lassa virus, Latino virus, Loei River virus, Lujo virus, Luna virus, Luli virus, Lunk virus, lymphocytic choriomeningitis virus, Machupo virus, Mariental virus, Merino Walk virus, Mobala virus, Mopeia virus, Morogoro virus, Okahandja virus, Oliveros virus, Parana virus, Pirital virus, Apore virus, Ryukyu virus, Amapari virus, Solwezi virus, souris virus, Tacaribe virus, Tamiami virus, Wenzhou virus, Whitewater Arroyo virus, Big Brushy Tank virus, Catarina virus, Skinner Tank virus, Tonto Creek virus, or Xapuri virus. In certain embodiments, the arenavirus for use with the methods and compositions provided herein is an arenavirus of Clade A. In certain embodiments, the arenavirus for use with the methods and compositions provided herein is Pichinde virus. In certain embodiments, an arenavirus as described herein wherein the GP signal peptide is fused to a buffer peptide (i) grows to higher titers, and/or (ii) reaches peak titers earlier, and/or (iii) exhibits a higher rescue efficiency (i.e., higher percentage of RCV titer-positive rescues of total rescues), as compared to a control arenavirus that has the same genomic organization except it lacks a buffer peptide. In certain embodiments, any native signal peptide of a heterologous non-arenaviral polypeptide has been removed.

### 5.1 Polypeptide Selected from the Group Consisting of Arenavirus GP, NP, Z and L

[0074] In certain embodiments, provided herein is a nucleotide sequence comprising one or more ORFs comprising a nucleotide sequence encoding a functional fragment of a polypeptide. In certain embodiments, the functional fragment is fused to a buffer peptide (as described in Section 5.4). In more specific embodiments, following translation of the functional fragment and the buffer peptide, a peptidase can cleave the functional fragment/buffer peptide fusion close to or at the fusion site. In certain embodiments, provided herein is an arenavirus genomic or antigenomic segment engineered such that transcription thereof results in one or more mRNA transcripts comprising a nucleotide sequence encoding a functional fragment of a polypeptide. In certain embodiments, the polypeptide as described herein is selected from the group consisting of arenavirus GP, NP, Z, and L, namely from the group consisting of arenavirus glycoprotein, nucleoprotein, Z protein, L protein, glycoprotein precursor, nucleoprotein precursor, Z protein precursor, and L protein precursor. In certain embodiments, the arenavirus GP, NP, Z, and L are wild-type. In other embodiments, the arenavirus GP, NP, Z, and L are recombinant. In certain embodiments, the arenavirus GP, NP, Z, and L are mutated. In certain embodiments, the arenavirus GP, NP, Z, and L are derived from an attenuated virus.

[0075] In certain embodiments, the polypeptide described herein is selected from the group consisting of wild-type arenavirus glycoprotein, nucleoprotein, Z protein, L protein, glycoprotein precursor, nucleoprotein precursor, Z protein precursor, and L protein precursor. In certain embodiments, the polypeptide described herein is a wild-type arenavirus glycoprotein precursor. In certain embodiments, the wild-type arenavirus glycoprotein precursor can be processed into a GP signal peptide, a GP1 and a GP2.

[0076] In certain embodiments, the polypeptide described herein is selected from the group consisting of recombinant arenavirus glycoprotein, nucleoprotein, Z protein, L protein, glycoprotein precursor, nucleoprotein precursor, Z protein precursor, and L protein precursor. In certain embodiments, the polypeptide described herein is a recombinant arenavirus glycoprotein precursor. In certain embodiments, the recombinant arenavirus glycoprotein precursor can be processed into a GP signal peptide, a GP1 and a GP2, one or more of which are recombinant. In some embodiments, a GP signal peptide (or functional fragment thereof or polypeptide comprising the GP signal peptide or functional fragment thereof) of the disclosure is fused to a buffer peptide (as described in Section 5.4). In more specific embodiments, following translation of the GP signal peptide (or functional fragment thereof or polypeptide comprising the GP signal peptide or functional fragment thereof) and the buffer peptide, a peptidase can cleave the GP signal peptide (or functional fragment thereof or polypeptide comprising the GP signal peptide or functional fragment thereof)/buffer peptide fusion close to (eg, −5, −4, −3, −2, −1, +1, +2, +3, +4, or +5 amino acid position from the fusion site) or at the fusion site.

[0077] In certain embodiments, the polypeptide described herein is selected from the group consisting of mutated arenavirus glycoprotein, nucleoprotein, Z protein, L protein, glycoprotein precursor, nucleoprotein precursor, Z protein precursor, and L protein precursor. In certain embodiments, the polypeptide described herein is a mutated arenavirus glycoprotein precursor. In certain embodiments, the mutated arenavirus glycoprotein precursor can be processed into a GP signal peptide, a GP1 and a GP2, one or more of which are mutated.

[0078] In certain embodiments, the polypeptide described herein is selected from the group consisting of arenavirus glycoprotein, nucleoprotein, Z protein, L protein, glycoprotein precursor, nucleoprotein precursor, Z protein precursor, and L protein precursor that are derived from an attenuated virus. In certain embodiments, the polypeptide described herein is an arenavirus glycoprotein precursor derived from an attenuated virus. In certain embodiments, the arenavirus glycoprotein precursor can be processed into a GP signal peptide, a GP1 and a GP2, one or more of which are derived from an attenuated virus.

[0079] In certain embodiments, the polypeptide described herein is selected from the group consisting of GP, NP, Z and L of LCMV, Lassa virus, Pichinde virus, Oliveros virus, Tamiami virus, Mobala virus, Mopeia virus, Ippy virus, Amapari virus, Flexal virus, Guanarito virus, Latino virus, Machupo virus, Parana virus, Pirital virus, Sabia virus, Tacaribe virus, Bear Canyon virus, Whitewater Arroyo virus, Allpahuayo virus (ALLV), Alxa virus, Chapare virus, Lijiang virus, Cupixi virus, Gairo virus, Loei River virus, Lujo virus, Luna virus, Luli virus, Lunk virus, Mariental virus, Merino Walk virus, Morogoro virus, Okahandja virus, Apore virus, Ryukyu virus, Solwezi virus, souris virus, Wenzhou virus, Big Brushy Tank virus, Catarina virus, Skinner Tank virus, Tonto Creek virus, Xapuri virus, or Junin virus.

[0080] In certain embodiments, the polypeptide described herein comprises an amino acid sequence that is at least 80%, 85%, 90%, 95%, 96%, 97%, 98%, 99% or 100% identical to the amino acid sequence of SEQ ID NO:1, SEQ ID NO:2, SEQ ID NO:3, SEQ ID NO:4, SEQ ID NO:5, SEQ ID NO:6, SEQ ID NO:7, SEQ ID NO:8, SEQ ID NO:9, SEQ ID NO:10, SEQ ID NO:11, SEQ ID NO:12, SEQ ID NO:13, SEQ ID NO:14, SEQ ID NO:15, SEQ ID NO:16, SEQ ID NO:17, SEQ ID NO:18, SEQ ID NO:19, SEQ ID NO:20, SEQ ID NO:21, SEQ ID NO:22, SEQ ID NO:23, SEQ ID NO:24, SEQ ID NO:48, SEQ ID NO:52, SEQ ID NO:59, SEQ ID NO:66, SEQ ID NO:73, SEQ ID NO:80, SEQ ID NO:84, SEQ ID NO:91, SEQ ID NO:98, SEQ ID NO:105, SEQ ID NO: 109, SEQ ID NO: 113, SEQ ID NO:120, SEQ ID NO:127, SEQ ID NO:134, SEQ ID NO:49, SEQ ID NO:56, SEQ ID NO:63, SEQ ID NO:70, SEQ ID NO:77, SEQ ID NO:81, SEQ ID NO:88, SEQ ID NO:95, SEQ ID NO:102, SEQ ID NO:106, SEQ ID NO:110, SEQ ID NO:117, SEQ ID NO:124, SEQ ID NO:131, SEQ ID NO:138, SEQ ID NO:50, SEQ ID NO:57, SEQ ID NO:64, SEQ ID NO:71, SEQ ID NO:78, SEQ ID NO:82, SEQ ID NO:89, SEQ ID NO:96, SEQ ID NO:103, SEQ ID NO:107, SEQ ID NO:111, SEQ ID NO:118, SEQ ID NO:125, SEQ ID NO:132, SEQ ID NO:139, SEQ ID NO:51, SEQ ID NO:58, SEQ ID NO:65, SEQ ID NO:72, SEQ ID NO:79, SEQ ID NO:83, SEQ ID NO:90, SEQ ID NO:97, SEQ ID NO:104, SEQ ID NO:108, SEQ ID NO:112, SEQ ID NO:119, SEQ ID NO:126, SEQ ID NO:133, or SEQ ID NO:140. In certain embodiments, the polypeptide described herein comprises an amino acid sequence that is at least 80% identical to the amino acid sequence of SEQ ID NO:1, SEQ ID NO:2, SEQ ID NO:3, SEQ ID NO:4, SEQ ID NO:5, SEQ ID NO:6, SEQ ID NO:7, SEQ ID NO:8, SEQ ID NO:9, SEQ ID NO:10, SEQ ID NO: 11, SEQ ID NO:12, SEQ ID NO:13, SEQ ID NO:14, SEQ ID NO:15, SEQ ID NO:16, SEQ ID NO:17, SEQ ID NO:18, SEQ ID NO:19, SEQ ID NO:20, SEQ ID NO:21, SEQ ID NO:22, SEQ ID NO:23, SEQ ID NO:24, SEQ ID NO:48, SEQ ID NO:52, SEQ ID NO:59, SEQ ID NO:66, SEQ ID NO:73, SEQ ID NO:80, SEQ ID NO:84, SEQ ID NO:91, SEQ ID NO:98, SEQ ID NO:105, SEQ ID NO:109, SEQ ID NO:113, SEQ ID NO:120, SEQ ID NO:127, SEQ ID NO:134, SEQ ID NO:49, SEQ ID NO:56, SEQ ID NO:63, SEQ ID NO:70, SEQ ID NO:77, SEQ ID NO:81, SEQ ID NO:88, SEQ ID NO:95, SEQ ID NO:102, SEQ ID NO: 106, SEQ ID NO:110, SEQ ID NO: 117, SEQ ID NO:124, SEQ ID NO:131, SEQ ID NO:138, SEQ ID NO:50, SEQ ID NO:57, SEQ ID NO:64, SEQ ID NO:71, SEQ ID NO:78, SEQ ID NO:82, SEQ ID NO:89, SEQ ID NO:96, SEQ ID NO:103, SEQ ID NO:107, SEQ ID NO:111, SEQ ID NO:118, SEQ ID NO:125, SEQ ID NO:132, SEQ ID NO:139, SEQ ID NO:51, SEQ ID NO:58, SEQ ID NO:65, SEQ ID NO:72, SEQ ID NO:79, SEQ ID NO:83, SEQ ID NO:90, SEQ ID NO:97, SEQ ID NO:104, SEQ ID NO:108, SEQ ID NO:112, SEQ ID NO:119, SEQ ID NO:126, SEQ ID NO:133, or SEQ ID NO:140. In certain embodiments, the polypeptide described herein comprises an amino acid sequence that is at least 85% identical to the amino acid sequence of SEQ ID NO:1, SEQ ID NO:2, SEQ ID NO:3, SEQ ID NO:4, SEQ ID NO:5, SEQ ID NO:6, SEQ ID NO:7, SEQ ID NO:8, SEQ ID NO:9, SEQ ID NO:10, SEQ ID NO:11, SEQ ID NO:12, SEQ ID NO:13, SEQ ID NO:14, SEQ ID NO:15, SEQ ID NO:16, SEQ ID NO:17, SEQ ID NO:18, SEQ ID NO:19, SEQ ID NO:20, SEQ ID NO:21, SEQ ID NO:22, SEQ ID NO:23, SEQ ID NO:24, SEQ ID NO:48, SEQ ID NO:52, SEQ ID NO:59, SEQ ID NO:66, SEQ ID NO:73, SEQ ID NO:80, SEQ ID NO:84, SEQ ID NO:91, SEQ ID NO:98, SEQ ID NO:105, SEQ ID NO:109, SEQ ID NO: 113, SEQ ID NO:120, SEQ ID NO:127, SEQ ID NO:134, SEQ ID NO:49, SEQ ID NO:56, SEQ ID NO:63, SEQ ID NO:70, SEQ ID NO:77, SEQ ID NO:81, SEQ ID NO:88, SEQ ID NO:95, SEQ ID NO:102, SEQ ID NO:106, SEQ ID NO:110, SEQ ID NO:117, SEQ ID NO:124, SEQ ID NO:131, SEQ ID NO:138, SEQ ID NO:50, SEQ ID NO:57, SEQ ID NO:64, SEQ ID NO:71, SEQ ID NO:78, SEQ ID NO:82, SEQ ID NO:89, SEQ ID NO:96, SEQ ID NO:103, SEQ ID NO: 107, SEQ ID NO:111, SEQ ID NO: 118, SEQ ID NO:125, SEQ ID NO:132, SEQ ID NO:139, SEQ ID NO:51, SEQ ID NO:58, SEQ ID NO:65, SEQ ID NO:72, SEQ ID NO:79, SEQ ID NO:83, SEQ ID NO:90, SEQ ID NO:97, SEQ ID NO:104, SEQ ID NO:108, SEQ ID NO:112, SEQ ID NO:119, SEQ ID NO:126, SEQ ID NO:133, or SEQ ID NO:140. In certain embodiments, the polypeptide described herein comprises an amino acid sequence that is at least 90% identical to the amino acid sequence of SEQ ID NO:1, SEQ ID NO:2, SEQ ID NO:3, SEQ ID NO:4, SEQ ID NO:5, SEQ ID NO:6, SEQ ID NO:7, SEQ ID NO:8, SEQ ID NO:9, SEQ ID NO:10, SEQ ID NO:11, SEQ ID NO:12, SEQ ID NO:13, SEQ ID NO:14, SEQ ID NO:15, SEQ ID NO:16, SEQ ID NO:17, SEQ ID NO:18, SEQ ID NO:19, SEQ ID NO:20, SEQ ID NO:21, SEQ ID NO:22, SEQ ID NO:23, SEQ ID NO:24, SEQ ID NO:48, SEQ ID NO:52, SEQ ID NO:59, SEQ ID NO:66, SEQ ID NO:73, SEQ ID NO:80, SEQ ID NO:84, SEQ ID NO:91, SEQ ID NO:98, SEQ ID NO:105, SEQ ID NO:109, SEQ ID NO:113, SEQ ID NO:120, SEQ ID NO:127, SEQ ID NO:134, SEQ ID NO:49, SEQ ID NO:56, SEQ ID NO:63, SEQ ID NO:70, SEQ ID NO:77, SEQ ID NO:81, SEQ ID NO:88, SEQ ID NO:95, SEQ ID NO:102, SEQ ID NO:106, SEQ ID NO:110, SEQ ID NO:117, SEQ ID NO:124, SEQ ID NO:131, SEQ ID NO:138, SEQ ID NO:50, SEQ ID NO:57, SEQ ID NO:64, SEQ ID NO:71, SEQ ID NO:78, SEQ ID NO:82, SEQ ID NO:89, SEQ ID NO:96, SEQ ID NO:103, SEQ ID NO:107, SEQ ID NO:111, SEQ ID NO:118, SEQ ID NO:125, SEQ ID NO:132, SEQ ID NO:139, SEQ ID NO:51, SEQ ID NO:58, SEQ ID NO:65, SEQ ID NO:72, SEQ ID NO:79, SEQ ID NO:83, SEQ ID NO:90, SEQ ID NO:97, SEQ ID NO:104, SEQ ID NO:108, SEQ ID NO:112, SEQ ID NO: 119, SEQ ID NO:126, SEQ ID NO:133, or SEQ ID NO:140. In certain embodiments, the polypeptide described herein comprises an amino acid sequence that is at least 95% identical to the amino acid sequence of SEQ ID NO:1, SEQ ID NO:2, SEQ ID NO:3, SEQ ID NO:4, SEQ ID NO:5, SEQ ID NO:6, SEQ ID NO:7, SEQ ID NO:8, SEQ ID NO:9, SEQ ID NO:10, SEQ ID NO:11, SEQ ID NO:12, SEQ ID NO:13, SEQ ID NO:14, SEQ ID NO:15, SEQ ID NO:16, SEQ ID NO:17, SEQ ID NO:18, SEQ ID NO:19, SEQ ID NO:20, SEQ ID NO:21, SEQ ID NO:22, SEQ ID NO:23, SEQ ID NO:24, SEQ ID NO:48, SEQ ID NO:52, SEQ ID NO:59, SEQ ID NO:66, SEQ ID NO:73, SEQ ID NO:80, SEQ ID NO:84, SEQ ID NO:91, SEQ ID NO:98, SEQ ID NO:105, SEQ ID NO:109, SEQ ID NO:113, SEQ ID NO:120, SEQ ID NO:127, SEQ ID NO:134, SEQ ID NO:49, SEQ ID NO:56, SEQ ID NO:63, SEQ ID NO:70, SEQ ID NO:77, SEQ ID NO:81, SEQ ID NO:88, SEQ ID NO:95, SEQ ID NO:102, SEQ ID NO:106, SEQ ID NO:110, SEQ ID NO: 117, SEQ ID NO:124, SEQ ID NO:131, SEQ ID NO:138, SEQ ID NO:50, SEQ ID NO:57, SEQ ID NO:64, SEQ ID NO:71, SEQ ID NO:78, SEQ ID NO:82, SEQ ID NO:89, SEQ ID NO:96, SEQ ID NO:103, SEQ ID NO:107, SEQ ID NO:111, SEQ ID NO:118, SEQ ID NO:125, SEQ ID NO:132, SEQ ID NO:139, SEQ ID NO:51, SEQ ID NO:58, SEQ ID NO:65, SEQ ID NO:72, SEQ ID NO:79, SEQ ID NO:83, SEQ ID NO:90, SEQ ID NO:97, SEQ ID NO:104, SEQ ID NO:108, SEQ ID NO: 112, SEQ ID NO: 119, SEQ ID NO:126, SEQ ID NO:133, or SEQ ID NO:140. In certain embodiments, the polypeptide described herein comprises an amino acid sequence that is at least 96% identical to the amino acid sequence of SEQ ID NO:1, SEQ ID NO:2, SEQ ID NO:3, SEQ ID NO:4, SEQ ID NO:5, SEQ ID NO:6, SEQ ID NO:7, SEQ ID NO:8, SEQ ID NO:9, SEQ ID NO:10, SEQ ID NO:11, SEQ ID NO:12, SEQ ID NO:13, SEQ ID NO:14, SEQ ID NO:15, SEQ ID NO:16, SEQ ID NO:17, SEQ ID NO:18, SEQ ID NO:19, SEQ ID NO:20, SEQ ID NO:21, SEQ ID NO:22, SEQ ID NO:23, SEQ ID NO:24, SEQ ID NO:48, SEQ ID NO:52, SEQ ID NO:59, SEQ ID NO:66, SEQ ID NO:73, SEQ ID NO:80, SEQ ID NO:84, SEQ ID NO:91, SEQ ID NO:98, SEQ ID NO:105, SEQ ID NO:109, SEQ ID NO:113, SEQ ID NO:120, SEQ ID NO:127, SEQ ID NO:134, SEQ ID NO:49, SEQ ID NO:56, SEQ ID NO:63, SEQ ID NO:70, SEQ ID NO:77, SEQ ID NO:81, SEQ ID NO:88, SEQ ID NO:95, SEQ ID NO:102, SEQ ID NO: 106, SEQ ID NO:110, SEQ ID NO: 117, SEQ ID NO:124, SEQ ID NO:131, SEQ ID NO:138, SEQ ID NO:50, SEQ ID NO:57, SEQ ID NO:64, SEQ ID NO:71, SEQ ID NO:78, SEQ ID NO:82, SEQ ID NO:89, SEQ ID NO:96, SEQ ID NO:103, SEQ ID NO:107, SEQ ID NO:111, SEQ ID NO:118, SEQ ID NO:125, SEQ ID NO:132, SEQ ID NO:139, SEQ ID NO:51, SEQ ID NO:58, SEQ ID NO:65, SEQ ID NO:72, SEQ ID NO:79, SEQ ID NO:83, SEQ ID NO:90, SEQ ID NO:97, SEQ ID NO:104, SEQ ID NO:108, SEQ ID NO:112, SEQ ID NO:119, SEQ ID NO:126, SEQ ID NO:133, or SEQ ID NO:140. In certain embodiments, the polypeptide described herein comprises an amino acid sequence that is at least 97% identical to the amino acid sequence of SEQ ID NO:1, SEQ ID NO:2, SEQ ID NO:3, SEQ ID NO:4, SEQ ID NO:5, SEQ ID NO:6, SEQ ID NO:7, SEQ ID NO:8, SEQ ID NO:9, SEQ ID NO:10, SEQ ID NO:11, SEQ ID NO:12, SEQ ID NO:13, SEQ ID NO:14, SEQ ID NO:15, SEQ ID NO:16, SEQ ID NO:17, SEQ ID NO:18, SEQ ID NO:19, SEQ ID NO:20, SEQ ID NO:21, SEQ ID NO:22, SEQ ID NO:23, SEQ ID NO:24, SEQ ID NO:48, SEQ ID NO:52, SEQ ID NO:59, SEQ ID NO:66, SEQ ID NO:73, SEQ ID NO:80, SEQ ID NO:84, SEQ ID NO:91, SEQ ID NO:98, SEQ ID NO:105, SEQ ID NO:109, SEQ ID NO: 113, SEQ ID NO:120, SEQ ID NO:127, SEQ ID NO:134, SEQ ID NO:49, SEQ ID NO:56, SEQ ID NO:63, SEQ ID NO:70, SEQ ID NO:77, SEQ ID NO:81, SEQ ID NO:88, SEQ ID NO:95, SEQ ID NO:102, SEQ ID NO:106, SEQ ID NO:110, SEQ ID NO:117, SEQ ID NO:124, SEQ ID NO:131, SEQ ID NO:138, SEQ ID NO:50, SEQ ID NO:57, SEQ ID NO:64, SEQ ID NO:71, SEQ ID NO:78, SEQ ID NO:82, SEQ ID NO:89, SEQ ID NO:96, SEQ ID NO:103, SEQ ID NO: 107, SEQ ID NO:111, SEQ ID NO: 118, SEQ ID NO:125, SEQ ID NO:132, SEQ ID NO:139, SEQ ID NO:51, SEQ ID NO:58, SEQ ID NO:65, SEQ ID NO:72, SEQ ID NO:79, SEQ ID NO:83, SEQ ID NO:90, SEQ ID NO:97, SEQ ID NO:104, SEQ ID NO:108, SEQ ID NO:112, SEQ ID NO:119, SEQ ID NO:126, SEQ ID NO:133, or SEQ ID NO:140. In certain embodiments, the polypeptide described herein comprises an amino acid sequence that is at least 98% identical to the amino acid sequence of SEQ ID NO:1, SEQ ID NO:2, SEQ ID NO:3, SEQ ID NO:4, SEQ ID NO:5, SEQ ID NO:6, SEQ ID NO:7, SEQ ID NO:8, SEQ ID NO:9, SEQ ID NO:10, SEQ ID NO:11, SEQ ID NO:12, SEQ ID NO:13, SEQ ID NO:14, SEQ ID NO:15, SEQ ID NO:16, SEQ ID NO:17, SEQ ID NO:18, SEQ ID NO:19, SEQ ID NO:20, SEQ ID NO:21, SEQ ID NO:22, SEQ ID NO:23, SEQ ID NO:24, SEQ ID NO:48, SEQ ID NO:52, SEQ ID NO:59, SEQ ID NO:66, SEQ ID NO:73, SEQ ID NO:80, SEQ ID NO:84, SEQ ID NO:91, SEQ ID NO:98, SEQ ID NO:105, SEQ ID NO:109, SEQ ID NO:113, SEQ ID NO:120, SEQ ID NO:127, SEQ ID NO:134, SEQ ID NO:49, SEQ ID NO:56, SEQ ID NO:63, SEQ ID NO:70, SEQ ID NO:77, SEQ ID NO:81, SEQ ID NO:88, SEQ ID NO:95, SEQ ID NO:102, SEQ ID NO:106, SEQ ID NO:110, SEQ ID NO:117, SEQ ID NO:124, SEQ ID NO:131, SEQ ID NO:138, SEQ ID NO:50, SEQ ID NO:57, SEQ ID NO:64, SEQ ID NO:71, SEQ ID NO:78, SEQ ID NO:82, SEQ ID NO:89, SEQ ID NO:96, SEQ ID NO:103, SEQ ID NO:107, SEQ ID NO:111, SEQ ID NO:118, SEQ ID NO:125, SEQ ID NO:132, SEQ ID NO:139, SEQ ID NO:51, SEQ ID NO:58, SEQ ID NO:65, SEQ ID NO:72, SEQ ID NO:79, SEQ ID NO:83, SEQ ID NO:90, SEQ ID NO:97, SEQ ID NO:104, SEQ ID NO:108, SEQ ID NO:112, SEQ ID NO: 119, SEQ ID NO:126, SEQ ID NO:133, or SEQ ID NO:140. In certain embodiments, the polypeptide described herein comprises an amino acid sequence that is at least 99% identical to the amino acid sequence of SEQ ID NO:1, SEQ ID NO:2, SEQ ID NO:3, SEQ ID NO:4, SEQ ID NO:5, SEQ ID NO:6, SEQ ID NO:7, SEQ ID NO:8, SEQ ID NO:9, SEQ ID NO:10, SEQ ID NO:11, SEQ ID NO:12, SEQ ID NO:13, SEQ ID NO:14, SEQ ID NO:15, SEQ ID NO:16, SEQ ID NO:17, SEQ ID NO:18, SEQ ID NO:19, SEQ ID NO:20, SEQ ID NO:21, SEQ ID NO:22, SEQ ID NO:23, SEQ ID NO:24, SEQ ID NO:48, SEQ ID NO:52, SEQ ID NO:59, SEQ ID NO:66, SEQ ID NO:73, SEQ ID NO:80, SEQ ID NO:84, SEQ ID NO:91, SEQ ID NO:98, SEQ ID NO:105, SEQ ID NO:109, SEQ ID NO:113, SEQ ID NO:120, SEQ ID NO:127, SEQ ID NO:134, SEQ ID NO:49, SEQ ID NO:56, SEQ ID NO:63, SEQ ID NO:70, SEQ ID NO:77, SEQ ID NO:81, SEQ ID NO:88, SEQ ID NO:95, SEQ ID NO:102, SEQ ID NO:106, SEQ ID NO:110, SEQ ID NO: 117, SEQ ID NO:124, SEQ ID NO:131, SEQ ID NO:138, SEQ ID NO:50, SEQ ID NO:57, SEQ ID NO:64, SEQ ID NO:71, SEQ ID NO:78, SEQ ID NO:82, SEQ ID NO:89, SEQ ID NO:96, SEQ ID NO:103, SEQ ID NO:107, SEQ ID NO:111, SEQ ID NO:118, SEQ ID NO:125, SEQ ID NO:132, SEQ ID NO:139, SEQ ID NO:51, SEQ ID NO:58, SEQ ID NO:65, SEQ ID NO:72, SEQ ID NO:79, SEQ ID NO:83, SEQ ID NO:90, SEQ ID NO:97, SEQ ID NO:104, SEQ ID NO:108, SEQ ID NO: 112, SEQ ID NO: 119, SEQ ID NO:126, SEQ ID NO:133, or SEQ ID NO:140. In certain embodiments, the polypeptide described herein comprises an amino acid sequence that is 100% identical to the amino acid sequence of SEQ ID NO:1, SEQ ID NO:2, SEQ ID NO:3, SEQ ID NO:4, SEQ ID NO:5, SEQ ID NO:6, SEQ ID NO:7, SEQ ID NO:8, SEQ ID NO:9, SEQ ID NO:10, SEQ ID NO: 11, SEQ ID NO:12, SEQ ID NO:13, SEQ ID NO:14, SEQ ID NO:15, SEQ ID NO:16, SEQ ID NO:17, SEQ ID NO:18, SEQ ID NO:19, SEQ ID NO:20, SEQ ID NO:21, SEQ ID NO:22, SEQ ID NO:23, SEQ ID NO:24, SEQ ID NO:48, SEQ ID NO:52, SEQ ID NO:59, SEQ ID NO:66, SEQ ID NO:73, SEQ ID NO:80, SEQ ID NO:84, SEQ ID NO:91, SEQ ID NO:98, SEQ ID NO:105, SEQ ID NO:109, SEQ ID NO:113, SEQ ID NO:120, SEQ ID NO:127, SEQ ID NO:134, SEQ ID NO:49, SEQ ID NO:56, SEQ ID NO:63, SEQ ID NO:70, SEQ ID NO:77, SEQ ID NO:81, SEQ ID NO:88, SEQ ID NO:95, SEQ ID NO:102, SEQ ID NO: 106, SEQ ID NO:110, SEQ ID NO: 117, SEQ ID NO:124, SEQ ID NO:131, SEQ ID NO:138, SEQ ID NO:50, SEQ ID NO:57, SEQ ID NO:64, SEQ ID NO:71, SEQ ID NO:78, SEQ ID NO:82, SEQ ID NO:89, SEQ ID NO:96, SEQ ID NO:103, SEQ ID NO:107, SEQ ID NO:111, SEQ ID NO:118, SEQ ID NO:125, SEQ ID NO:132, SEQ ID NO:139, SEQ ID NO:51, SEQ ID NO:58, SEQ ID NO:65, SEQ ID NO:72, SEQ ID NO:79, SEQ ID NO:83, SEQ ID NO:90, SEQ ID NO:97, SEQ ID NO:104, SEQ ID NO:108, SEQ ID NO:112, SEQ ID NO:119, SEQ ID NO:126, SEQ ID NO:133, or SEQ ID NO:140. In certain embodiments, the polypeptide described herein comprises an amino acid sequence that is 80% identical to the amino acid sequence of SEQ ID NO:1, SEQ ID NO:2, SEQ ID NO:3, SEQ ID NO:4, SEQ ID NO:5, SEQ ID NO:6, SEQ ID NO:7, SEQ ID NO:8, SEQ ID NO:9, SEQ ID NO:10, SEQ ID NO: 11, SEQ ID NO:12, SEQ ID NO:13, SEQ ID NO:14, SEQ ID NO:15, SEQ ID NO:16, SEQ ID NO:17, SEQ ID NO:18, SEQ ID NO:19, SEQ ID NO:20, SEQ ID NO:21, SEQ ID NO:22, SEQ ID NO:23, SEQ ID NO:24, SEQ ID NO:48, SEQ ID NO:52, SEQ ID NO:59, SEQ ID NO:66, SEQ ID NO:73, SEQ ID NO:80, SEQ ID NO:84, SEQ ID NO:91, SEQ ID NO:98, SEQ ID NO:105, SEQ ID NO:109, SEQ ID NO: 113, SEQ ID NO:120, SEQ ID NO:127, SEQ ID NO:134, SEQ ID NO:49, SEQ ID NO:56, SEQ ID NO:63, SEQ ID NO:70, SEQ ID NO:77, SEQ ID NO:81, SEQ ID NO:88, SEQ ID NO:95, SEQ ID NO:102, SEQ ID NO: 106, SEQ ID NO:110, SEQ ID NO: 117, SEQ ID NO:124, SEQ ID NO:131, SEQ ID NO:138, SEQ ID NO:50, SEQ ID NO:57, SEQ ID NO:64, SEQ ID NO:71, SEQ ID NO:78, SEQ ID NO:82, SEQ ID NO:89, SEQ ID NO:96, SEQ ID NO:103, SEQ ID NO:107, SEQ ID NO:111, SEQ ID NO:118, SEQ ID NO:125, SEQ ID NO:132, SEQ ID NO:139, SEQ ID NO:51, SEQ ID NO:58, SEQ ID NO:65, SEQ ID NO:72, SEQ ID NO:79, SEQ ID NO:83, SEQ ID NO:90, SEQ ID NO:97, SEQ ID NO:104, SEQ ID NO:108, SEQ ID NO:112, SEQ ID NO:119, SEQ ID NO:126, SEQ ID NO:133, or SEQ ID NO:140. In certain embodiments, the polypeptide described herein comprises an amino acid sequence that is 85% identical to the amino acid sequence of SEQ ID NO:1, SEQ ID NO:2, SEQ ID NO:3, SEQ ID NO:4, SEQ ID NO:5, SEQ ID NO:6, SEQ ID NO:7, SEQ ID NO:8, SEQ ID NO:9, SEQ ID NO:10, SEQ ID NO: 11, SEQ ID NO:12, SEQ ID NO:13, SEQ ID NO:14, SEQ ID NO:15, SEQ ID NO:16, SEQ ID NO:17, SEQ ID NO:18, SEQ ID NO:19, SEQ ID NO:20, SEQ ID NO:21, SEQ ID NO:22, SEQ ID NO:23, SEQ ID NO:24, SEQ ID NO:48, SEQ ID NO:52, SEQ ID NO:59, SEQ ID NO:66, SEQ ID NO:73, SEQ ID NO:80, SEQ ID NO:84, SEQ ID NO:91, SEQ ID NO:98, SEQ ID NO:105, SEQ ID NO:109, SEQ ID NO: 113, SEQ ID NO:120, SEQ ID NO:127, SEQ ID NO:134, SEQ ID NO:49, SEQ ID NO:56, SEQ ID NO:63, SEQ ID NO:70, SEQ ID NO:77, SEQ ID NO:81, SEQ ID NO:88, SEQ ID NO:95, SEQ ID NO:102, SEQ ID NO: 106, SEQ ID NO:110, SEQ ID NO: 117, SEQ ID NO:124, SEQ ID NO:131, SEQ ID NO:138, SEQ ID NO:50, SEQ ID NO:57, SEQ ID NO:64, SEQ ID NO:71, SEQ ID NO:78, SEQ ID NO:82, SEQ ID NO:89, SEQ ID NO:96, SEQ ID NO:103, SEQ ID NO:107, SEQ ID NO:111, SEQ ID NO:118, SEQ ID NO:125, SEQ ID NO:132, SEQ ID NO:139, SEQ ID NO:51, SEQ ID NO:58, SEQ ID NO:65, SEQ ID NO:72, SEQ ID NO:79, SEQ ID NO:83, SEQ ID NO:90, SEQ ID NO:97, SEQ ID NO:104, SEQ ID NO:108, SEQ ID NO:112, SEQ ID NO:119, SEQ ID NO:126, SEQ ID NO:133, or SEQ ID NO:140. In certain embodiments, the polypeptide described herein comprises an amino acid sequence that is 90% identical to the amino acid sequence of SEQ ID NO:1, SEQ ID NO:2, SEQ ID NO:3, SEQ ID NO:4, SEQ ID NO:5, SEQ ID NO:6, SEQ ID NO:7, SEQ ID NO:8, SEQ ID NO:9, SEQ ID NO:10, SEQ ID NO: 11, SEQ ID NO:12, SEQ ID NO:13, SEQ ID NO:14, SEQ ID NO:15, SEQ ID NO:16, SEQ ID NO:17, SEQ ID NO:18, SEQ ID NO:19, SEQ ID NO:20, SEQ ID NO:21, SEQ ID NO:22, SEQ ID NO:23, SEQ ID NO:24, SEQ ID NO:48, SEQ ID NO:52, SEQ ID NO:59, SEQ ID NO:66, SEQ ID NO:73, SEQ ID NO:80, SEQ ID NO:84, SEQ ID NO:91, SEQ ID NO:98, SEQ ID NO:105, SEQ ID NO:109, SEQ ID NO: 113, SEQ ID NO:120, SEQ ID NO:127, SEQ ID NO:134, SEQ ID NO:49, SEQ ID NO:56, SEQ ID NO:63, SEQ ID NO:70, SEQ ID NO:77, SEQ ID NO:81, SEQ ID NO:88, SEQ ID NO:95, SEQ ID NO:102, SEQ ID NO: 106, SEQ ID NO:110, SEQ ID NO: 117, SEQ ID NO:124, SEQ ID NO:131, SEQ ID NO:138, SEQ ID NO:50, SEQ ID NO:57, SEQ ID NO:64, SEQ ID NO:71, SEQ ID NO:78, SEQ ID NO:82, SEQ ID NO:89, SEQ ID NO:96, SEQ ID NO:103, SEQ ID NO:107, SEQ ID NO:111, SEQ ID NO:118, SEQ ID NO:125, SEQ ID NO:132, SEQ ID NO:139, SEQ ID NO:51, SEQ ID NO:58, SEQ ID NO:65, SEQ ID NO:72, SEQ ID NO:79, SEQ ID NO:83, SEQ ID NO:90, SEQ ID NO:97, SEQ ID NO:104, SEQ ID NO:108, SEQ ID NO:112, SEQ ID NO:119, SEQ ID NO:126, SEQ ID NO:133, or SEQ ID NO:140. In certain embodiments, the polypeptide described herein comprises an amino acid sequence that is 95% identical to the amino acid sequence of SEQ ID NO:1, SEQ ID NO:2, SEQ ID NO:3, SEQ ID NO:4, SEQ ID NO:5, SEQ ID NO:6, SEQ ID NO:7, SEQ ID NO:8, SEQ ID NO:9, SEQ ID NO:10, SEQ ID NO: 11, SEQ ID NO:12, SEQ ID NO:13, SEQ ID NO:14, SEQ ID NO:15, SEQ ID NO:16, SEQ ID NO:17, SEQ ID NO:18, SEQ ID NO:19, SEQ ID NO:20, SEQ ID NO:21, SEQ ID NO:22, SEQ ID NO:23, SEQ ID NO:24, SEQ ID NO:48, SEQ ID NO:52, SEQ ID NO:59, SEQ ID NO:66, SEQ ID NO:73, SEQ ID NO:80, SEQ ID NO:84, SEQ ID NO:91, SEQ ID NO:98, SEQ ID NO:105, SEQ ID NO:109, SEQ ID NO: 113, SEQ ID NO:120, SEQ ID NO:127, SEQ ID NO:134, SEQ ID NO:49, SEQ ID NO:56, SEQ ID NO:63, SEQ ID NO:70, SEQ ID NO:77, SEQ ID NO:81, SEQ ID NO:88, SEQ ID NO:95, SEQ ID NO:102, SEQ ID NO: 106, SEQ ID NO:110, SEQ ID NO: 117, SEQ ID NO:124, SEQ ID NO:131, SEQ ID NO:138, SEQ ID NO:50, SEQ ID NO:57, SEQ ID NO:64, SEQ ID NO:71, SEQ ID NO:78, SEQ ID NO:82, SEQ ID NO:89, SEQ ID NO:96, SEQ ID NO:103, SEQ ID NO:107, SEQ ID NO:111, SEQ ID NO:118, SEQ ID NO:125, SEQ ID NO:132, SEQ ID NO:139, SEQ ID NO:51, SEQ ID NO:58, SEQ ID NO:65, SEQ ID NO:72, SEQ ID NO:79, SEQ ID NO:83, SEQ ID NO:90, SEQ ID NO:97, SEQ ID NO:104, SEQ ID NO:108, SEQ ID NO:112, SEQ ID NO:119, SEQ ID NO:126, SEQ ID NO:133, or SEQ ID NO:140. In certain embodiments, the polypeptide described herein comprises an amino acid sequence that is 96% identical to the amino acid sequence of SEQ ID NO:1, SEQ ID NO:2, SEQ ID NO:3, SEQ ID NO:4, SEQ ID NO:5, SEQ ID NO:6, SEQ ID NO:7, SEQ ID NO:8, SEQ ID NO:9, SEQ ID NO:10, SEQ ID NO: 11, SEQ ID NO:12, SEQ ID NO:13, SEQ ID NO:14, SEQ ID NO:15, SEQ ID NO:16, SEQ ID NO:17, SEQ ID NO:18, SEQ ID NO:19, SEQ ID NO:20, SEQ ID NO:21, SEQ ID NO:22, SEQ ID NO:23, SEQ ID NO:24, SEQ ID NO:48, SEQ ID NO:52, SEQ ID NO:59, SEQ ID NO:66, SEQ ID NO:73, SEQ ID NO:80, SEQ ID NO:84, SEQ ID NO:91, SEQ ID NO:98, SEQ ID NO:105, SEQ ID NO:109, SEQ ID NO: 113, SEQ ID NO:120, SEQ ID NO:127, SEQ ID NO:134, SEQ ID NO:49, SEQ ID NO:56, SEQ ID NO:63, SEQ ID NO:70, SEQ ID NO:77, SEQ ID NO:81, SEQ ID NO:88, SEQ ID NO:95, SEQ ID NO:102, SEQ ID NO: 106, SEQ ID NO:110, SEQ ID NO: 117, SEQ ID NO:124, SEQ ID NO:131, SEQ ID NO:138, SEQ ID NO:50, SEQ ID NO:57, SEQ ID NO:64, SEQ ID NO:71, SEQ ID NO:78, SEQ ID NO:82, SEQ ID NO:89, SEQ ID NO:96, SEQ ID NO:103, SEQ ID NO:107, SEQ ID NO:111, SEQ ID NO:118, SEQ ID NO:125, SEQ ID NO:132, SEQ ID NO:139, SEQ ID NO:51, SEQ ID NO:58, SEQ ID NO:65, SEQ ID NO:72, SEQ ID NO:79, SEQ ID NO:83, SEQ ID NO:90, SEQ ID NO:97, SEQ ID NO:104, SEQ ID NO:108, SEQ ID NO:112, SEQ ID NO:119, SEQ ID NO:126, SEQ ID NO:133, or SEQ ID NO:140. In certain embodiments, the polypeptide described herein comprises an amino acid sequence that is 97% identical to the amino acid sequence of SEQ ID NO:1, SEQ ID NO:2, SEQ ID NO:3, SEQ ID NO:4, SEQ ID NO:5, SEQ ID NO:6, SEQ ID NO:7, SEQ ID NO:8, SEQ ID NO:9, SEQ ID NO:10, SEQ ID NO: 11, SEQ ID NO:12, SEQ ID NO:13, SEQ ID NO:14, SEQ ID NO:15, SEQ ID NO:16, SEQ ID NO:17, SEQ ID NO:18, SEQ ID NO:19, SEQ ID NO:20, SEQ ID NO:21, SEQ ID NO:22, SEQ ID NO:23, SEQ ID NO:24, SEQ ID NO:48, SEQ ID NO:52, SEQ ID NO:59, SEQ ID NO:66, SEQ ID NO:73, SEQ ID NO:80, SEQ ID NO:84, SEQ ID NO:91, SEQ ID NO:98, SEQ ID NO:105, SEQ ID NO:109, SEQ ID NO: 113, SEQ ID NO:120, SEQ ID NO:127, SEQ ID NO:134, SEQ ID NO:49, SEQ ID NO:56, SEQ ID NO:63, SEQ ID NO:70, SEQ ID NO:77, SEQ ID NO:81, SEQ ID NO:88, SEQ ID NO:95, SEQ ID NO:102, SEQ ID NO: 106, SEQ ID NO:110, SEQ ID NO: 117, SEQ ID NO:124, SEQ ID NO:131, SEQ ID NO:138, SEQ ID NO:50, SEQ ID NO:57, SEQ ID NO:64, SEQ ID NO:71, SEQ ID NO:78, SEQ ID NO:82, SEQ ID NO:89, SEQ ID NO:96, SEQ ID NO:103, SEQ ID NO:107, SEQ ID NO:111, SEQ ID NO:118, SEQ ID NO:125, SEQ ID NO:132, SEQ ID NO:139, SEQ ID NO:51, SEQ ID NO:58, SEQ ID NO:65, SEQ ID NO:72, SEQ ID NO:79, SEQ ID NO:83, SEQ ID NO:90, SEQ ID NO:97, SEQ ID NO:104, SEQ ID NO:108, SEQ ID NO:112, SEQ ID NO:119, SEQ ID NO:126, SEQ ID NO:133, or SEQ ID NO:140. In certain embodiments, the polypeptide described herein comprises an amino acid sequence that is 98% identical to the amino acid sequence of SEQ ID NO:1, SEQ ID NO:2, SEQ ID NO:3, SEQ ID NO:4, SEQ ID NO:5, SEQ ID NO:6, SEQ ID NO:7, SEQ ID NO:8, SEQ ID NO:9, SEQ ID NO:10, SEQ ID NO: 11, SEQ ID NO:12, SEQ ID NO:13, SEQ ID NO:14, SEQ ID NO:15, SEQ ID NO:16, SEQ ID NO:17, SEQ ID NO:18, SEQ ID NO:19, SEQ ID NO:20, SEQ ID NO:21, SEQ ID NO:22, SEQ ID NO:23, SEQ ID NO:24, SEQ ID NO:48, SEQ ID NO:52, SEQ ID NO:59, SEQ ID NO:66, SEQ ID NO:73, SEQ ID NO:80, SEQ ID NO:84, SEQ ID NO:91, SEQ ID NO:98, SEQ ID NO:105, SEQ ID NO:109, SEQ ID NO: 113, SEQ ID NO:120, SEQ ID NO:127, SEQ ID NO:134, SEQ ID NO:49, SEQ ID NO:56, SEQ ID NO:63, SEQ ID NO:70, SEQ ID NO:77, SEQ ID NO:81, SEQ ID NO:88, SEQ ID NO:95, SEQ ID NO:102, SEQ ID NO: 106, SEQ ID NO:110, SEQ ID NO: 117, SEQ ID NO:124, SEQ ID NO:131, SEQ ID NO:138, SEQ ID NO:50, SEQ ID NO:57, SEQ ID NO:64, SEQ ID NO:71, SEQ ID NO:78, SEQ ID NO:82, SEQ ID NO:89, SEQ ID NO:96, SEQ ID NO:103, SEQ ID NO:107, SEQ ID NO:111, SEQ ID NO:118, SEQ ID NO:125, SEQ ID NO:132, SEQ ID NO:139, SEQ ID NO:51, SEQ ID NO:58, SEQ ID NO:65, SEQ ID NO:72, SEQ ID NO:79, SEQ ID NO:83, SEQ ID NO:90, SEQ ID NO:97, SEQ ID NO:104, SEQ ID NO:108, SEQ ID NO:112, SEQ ID NO:119, SEQ ID NO:126, SEQ ID NO:133, or SEQ ID NO:140. In certain embodiments, the polypeptide described herein comprises an amino acid sequence that is 99% identical to the amino acid sequence of SEQ ID NO:1, SEQ ID NO:2, SEQ ID NO:3, SEQ ID NO:4, SEQ ID NO:5, SEQ ID NO:6, SEQ ID NO:7, SEQ ID NO:8, SEQ ID NO:9, SEQ ID NO:10, SEQ ID NO: 11, SEQ ID NO:12, SEQ ID NO:13, SEQ ID NO:14, SEQ ID NO:15, SEQ ID NO:16, SEQ ID NO:17, SEQ ID NO:18, SEQ ID NO:19, SEQ ID NO:20, SEQ ID NO:21, SEQ ID NO:22, SEQ ID NO:23, SEQ ID NO:24, SEQ ID NO:48, SEQ ID NO:52, SEQ ID NO:59, SEQ ID NO:66, SEQ ID NO:73, SEQ ID NO:80, SEQ ID NO:84, SEQ ID NO:91, SEQ ID NO:98, SEQ ID NO:105, SEQ ID NO:109, SEQ ID NO: 113, SEQ ID NO:120, SEQ ID NO:127, SEQ ID NO:134, SEQ ID NO:49, SEQ ID NO:56, SEQ ID NO:63, SEQ ID NO:70, SEQ ID NO:77, SEQ ID NO:81, SEQ ID NO:88, SEQ ID NO:95, SEQ ID NO:102, SEQ ID NO: 106, SEQ ID NO:110, SEQ ID NO: 117, SEQ ID NO:124, SEQ ID NO:131, SEQ ID NO:138, SEQ ID NO:50, SEQ ID NO:57, SEQ ID NO:64, SEQ ID NO:71, SEQ ID NO:78, SEQ ID NO:82, SEQ ID NO:89, SEQ ID NO:96, SEQ ID NO:103, SEQ ID NO:107, SEQ ID NO:111, SEQ ID NO:118, SEQ ID NO:125, SEQ ID NO:132, SEQ ID NO:139, SEQ ID NO:51, SEQ ID NO:58, SEQ ID NO:65, SEQ ID NO:72, SEQ ID NO:79, SEQ ID NO:83, SEQ ID NO:90, SEQ ID NO:97, SEQ ID NO:104, SEQ ID NO:108, SEQ ID NO:112, SEQ ID NO:119, SEQ ID NO:126, SEQ ID NO:133, or SEQ ID NO:140.

[0081] In certain embodiments, the polypeptide as described herein is arenavirus GP, namely arenavirus glycoprotein or any glycoprotein precursor. In certain embodiments, the polypeptide described herein is a wild-type arenavirus glycoprotein or any wild-type glycoprotein precursor. In other embodiments, the polypeptide described herein is a recombinant arenavirus glycoprotein or any recombinant glycoprotein precursor. In certain embodiments, the arenavirus glycoprotein precursor can be processed into a GP signal peptide, a GP1 and a GP2. In certain embodiments, the arenavirus GP is arenavirus glycoprotein or any glycoprotein precursor of LCMV, Lassa virus, Pichinde virus, Oliveros virus, Tamiami virus, Mobala virus, Mopeia virus, Ippy virus, Amapari virus, Flexal virus, Guanarito virus, Latino virus, Machupo virus, Parana virus, Pirital virus, Sabia virus, Tacaribe virus, Bear Canyon virus, Whitewater Arroyo virus, Allpahuayo virus (ALLV), Alxa virus, Chapare virus, Lijiang virus, Cupixi virus, Gairo virus, Loei River virus, Lujo virus, Luna virus, Luli virus, Lunk virus, Mariental virus, Merino Walk virus, Morogoro virus, Okahandja virus, Apore virus, Ryukyu virus, Solwezi virus, souris virus, Wenzhou virus, Big Brushy Tank virus, Catarina virus, Skinner Tank virus, Tonto Creek virus, Xapuri virus, or Junin virus. In certain embodiments, the arenavirus GP as described herein comprises an amino acid sequence that is at least 80%, 85%, 90%, 95%, 96%, 97%, 98%, 99% or 100% identical to the amino acid sequence of SEQ ID NO:1, SEQ ID NO:2, SEQ ID NO:3, SEQ ID NO:4, SEQ ID NO:5, SEQ ID NO:6, SEQ ID NO:48, SEQ ID NO:52, SEQ ID NO:59, SEQ ID NO:66, SEQ ID NO:73, SEQ ID NO:80, SEQ ID NO:84, SEQ ID NO:91, SEQ ID NO:98, SEQ ID NO:105, SEQ ID NO: 109, SEQ ID NO: 113, SEQ ID NO:120, SEQ ID NO:127, or SEQ ID NO:134. In certain embodiments, the arenavirus GP as described herein comprises an amino acid sequence that is at least 80% identical to the amino acid sequence of SEQ ID NO:1, SEQ ID NO:2, SEQ ID NO:3, SEQ ID NO:4, SEQ ID NO:5, SEQ ID NO:6, SEQ ID NO:48, SEQ ID NO:52, SEQ ID NO:59, SEQ ID NO:66, SEQ ID NO:73, SEQ ID NO:80, SEQ ID NO:84, SEQ ID NO:91, SEQ ID NO:98, SEQ ID NO:105, SEQ ID NO:109, SEQ ID NO: 113, SEQ ID NO:120, SEQ ID NO:127, or SEQ ID NO:134. In certain embodiments, the arenavirus GP as described herein comprises an amino acid sequence that is at least 85% identical to the amino acid sequence of SEQ ID NO:1, SEQ ID NO:2, SEQ ID NO:3, SEQ ID NO:4, SEQ ID NO:5, SEQ ID NO:6, SEQ ID NO:48, SEQ ID NO:52, SEQ ID NO:59, SEQ ID NO:66, SEQ ID NO:73, SEQ ID NO:80, SEQ ID NO:84, SEQ ID NO:91, SEQ ID NO:98, SEQ ID NO:105, SEQ ID NO:109, SEQ ID NO:113, SEQ ID NO:120, SEQ ID NO:127, or SEQ ID NO:134. In certain embodiments, the GP as described herein comprises an amino acid sequence that is at least 90% identical to the amino acid sequence of SEQ ID NO:1, SEQ ID NO:2, SEQ ID NO:3, SEQ ID NO:4, SEQ ID NO:5, SEQ ID NO:6, SEQ ID NO:48, SEQ ID NO:52, SEQ ID NO:59, SEQ ID NO:66, SEQ ID NO:73, SEQ ID NO:80, SEQ ID NO:84, SEQ ID NO:91, SEQ ID NO:98, SEQ ID NO:105, SEQ ID NO:109, SEQ ID NO: 113, SEQ ID NO:120, SEQ ID NO:127, or SEQ ID NO:134. In certain embodiments, the arenavirus GP as described herein comprises an amino acid sequence that is at least 95% identical to the amino acid sequence of SEQ ID NO:1, SEQ ID NO:2, SEQ ID NO:3, SEQ ID NO:4, SEQ ID NO:5, SEQ ID NO:6, SEQ ID NO:48, SEQ ID NO:52, SEQ ID NO:59, SEQ ID NO:66, SEQ ID NO:73, SEQ ID NO:80, SEQ ID NO:84, SEQ ID NO:91, SEQ ID NO:98, SEQ ID NO:105, SEQ ID NO:109, SEQ ID NO:113, SEQ ID NO:120, SEQ ID NO:127, or SEQ ID NO:134. In certain embodiments, the arenavirus GP as described herein comprises an amino acid sequence that is at least 96% identical to the amino acid sequence of SEQ ID NO:1, SEQ ID NO:2, SEQ ID NO:3, SEQ ID NO:4, SEQ ID NO:5, SEQ ID NO:6, SEQ ID NO:48, SEQ ID NO:52, SEQ ID NO:59, SEQ ID NO:66, SEQ ID NO:73, SEQ ID NO:80, SEQ ID NO:84, SEQ ID NO:91, SEQ ID NO:98, SEQ ID NO:105, SEQ ID NO:109, SEQ ID NO: 113, SEQ ID NO:120, SEQ ID NO:127, or SEQ ID NO:134. In certain embodiments, the arenavirus GP as described herein comprises an amino acid sequence that is at least 97% identical to the amino acid sequence of SEQ ID NO:1, SEQ ID NO:2, SEQ ID NO:3, SEQ ID NO:4, SEQ ID NO:5, SEQ ID NO:6, SEQ ID NO:48, SEQ ID NO:52, SEQ ID NO:59, SEQ ID NO:66, SEQ ID NO:73, SEQ ID NO:80, SEQ ID NO:84, SEQ ID NO:91, SEQ ID NO:98, SEQ ID NO:105, SEQ ID NO:109, SEQ ID NO:113, SEQ ID NO:120, SEQ ID NO:127, or SEQ ID NO:134. In certain embodiments, the arenavirus GP as described herein comprises an amino acid sequence that is at least 98% identical to the amino acid sequence of SEQ ID NO:1, SEQ ID NO:2, SEQ ID NO:3, SEQ ID NO:4, SEQ ID NO:5, SEQ ID NO:6, SEQ ID NO:48, SEQ ID NO:52, SEQ ID NO:59, SEQ ID NO:66, SEQ ID NO:73, SEQ ID NO:80, SEQ ID NO:84, SEQ ID NO:91, SEQ ID NO:98, SEQ ID NO:105, SEQ ID NO:109, SEQ ID NO: 113, SEQ ID NO:120, SEQ ID NO:127, or SEQ ID NO:134. In certain embodiments, the arenavirus GP as described herein comprises an amino acid sequence that is at least 99% identical to the amino acid sequence of SEQ ID NO:1, SEQ ID NO:2, SEQ ID NO:3, SEQ ID NO:4, SEQ ID NO:5, SEQ ID NO:6, SEQ ID NO:48, SEQ ID NO:52, SEQ ID NO:59, SEQ ID NO:66, SEQ ID NO:73, SEQ ID NO:80, SEQ ID NO:84, SEQ ID NO:91, SEQ ID NO:98, SEQ ID NO:105, SEQ ID NO:109, SEQ ID NO:113, SEQ ID NO:120, SEQ ID NO:127, or SEQ ID NO:134. In certain embodiments, the arenavirus GP as described herein comprises an amino acid sequence that is 100% identical to the amino acid sequence of SEQ ID NO:1, SEQ ID NO:2, SEQ ID NO:3, SEQ ID NO:4, SEQ ID NO:5, SEQ ID NO:6, SEQ ID NO:48, SEQ ID NO:52, SEQ ID NO:59, SEQ ID NO:66, SEQ ID NO:73, SEQ ID NO:80, SEQ ID NO:84, SEQ ID NO:91, SEQ ID NO:98, SEQ ID NO:105, SEQ ID NO:109, SEQ ID NO: 113, SEQ ID NO:120, SEQ ID NO:127, or SEQ ID NO:134. In certain embodiments, the GP as described herein comprises an amino acid sequence that is 80% identical to the amino acid sequence of SEQ ID NO:1, SEQ ID NO:2, SEQ ID NO:3, SEQ ID NO:4, SEQ ID NO:5, SEQ ID NO:6, SEQ ID NO:48, SEQ ID NO:52, SEQ ID NO:59, SEQ ID NO:66, SEQ ID NO:73, SEQ ID NO:80, SEQ ID NO:84, SEQ ID NO:91, SEQ ID NO:98, SEQ ID NO:105, SEQ ID NO: 109, SEQ ID NO: 113, SEQ ID NO:120, SEQ ID NO:127, or SEQ ID NO:134. In certain embodiments, the arenavirus GP as described herein comprises an amino acid sequence that is 85% identical to the amino acid sequence of SEQ ID NO:1, SEQ ID NO:2, SEQ ID NO:3, SEQ ID NO:4, SEQ ID NO:5, SEQ ID NO:6, SEQ ID NO:48, SEQ ID NO:52, SEQ ID NO:59, SEQ ID NO:66, SEQ ID NO:73, SEQ ID NO:80, SEQ ID NO:84, SEQ ID NO:91, SEQ ID NO:98, SEQ ID NO:105, SEQ ID NO:109, SEQ ID NO:113, SEQ ID NO:120, SEQ ID NO:127, or SEQ ID NO:134. In certain embodiments, the arenavirus GP as described herein comprises an amino acid sequence that is 90% identical to the amino acid sequence of SEQ ID NO:1, SEQ ID NO:2, SEQ ID NO:3, SEQ ID NO:4, SEQ ID NO:5, SEQ ID NO:6, SEQ ID NO:48, SEQ ID NO:52, SEQ ID NO:59, SEQ ID NO:66, SEQ ID NO:73, SEQ ID NO:80, SEQ ID NO:84, SEQ ID NO:91, SEQ ID NO:98, SEQ ID NO:105, SEQ ID NO: 109, SEQ ID NO: 113, SEQ ID NO:120, SEQ ID NO:127, or SEQ ID NO:134. In certain embodiments, the arenavirus GP as described herein comprises an amino acid sequence that is 95% identical to the amino acid sequence of SEQ ID NO:1, SEQ ID NO:2, SEQ ID NO:3, SEQ ID NO:4, SEQ ID NO:5, SEQ ID NO:6, SEQ ID NO:48, SEQ ID NO:52, SEQ ID NO:59, SEQ ID NO:66, SEQ ID NO:73, SEQ ID NO:80, SEQ ID NO:84, SEQ ID NO:91, SEQ ID NO:98, SEQ ID NO:105, SEQ ID NO:109, SEQ ID NO:113, SEQ ID NO:120, SEQ ID NO:127, or SEQ ID NO: 134. In certain embodiments, the arenavirus GP as described herein comprises an amino acid sequence that is 96% identical to the amino acid sequence of SEQ ID NO:1, SEQ ID NO:2, SEQ ID NO:3, SEQ ID NO:4, SEQ ID NO:5, SEQ ID NO:6, SEQ ID NO:48, SEQ ID NO:52, SEQ ID NO:59, SEQ ID NO:66, SEQ ID NO:73, SEQ ID NO:80, SEQ ID NO:84, SEQ ID NO:91, SEQ ID NO:98, SEQ ID NO:105, SEQ ID NO: 109, SEQ ID NO: 113, SEQ ID NO:120, SEQ ID NO:127, or SEQ ID NO:134. In certain embodiments, the arenavirus GP as described herein comprises an amino acid sequence that is 97% identical to the amino acid sequence of SEQ ID NO:1, SEQ ID NO:2, SEQ ID NO:3, SEQ ID NO:4, SEQ ID NO:5, SEQ ID NO:6, SEQ ID NO:48, SEQ ID NO:52, SEQ ID NO:59, SEQ ID NO:66, SEQ ID NO:73, SEQ ID NO:80, SEQ ID NO:84, SEQ ID NO:91, SEQ ID NO:98, SEQ ID NO:105, SEQ ID NO:109, SEQ ID NO:113, SEQ ID NO:120, SEQ ID NO:127, or SEQ ID NO:134. In certain embodiments, the arenavirus GP as described herein comprises an amino acid sequence that is 98% identical to the amino acid sequence of SEQ ID NO:1, SEQ ID NO:2, SEQ ID NO:3, SEQ ID NO:4, SEQ ID NO:5, SEQ ID NO:6, SEQ ID NO:48, SEQ ID NO:52, SEQ ID NO:59, SEQ ID NO:66, SEQ ID NO:73, SEQ ID NO:80, SEQ ID NO:84, SEQ ID NO:91, SEQ ID NO:98, SEQ ID NO:105, SEQ ID NO: 109, SEQ ID NO: 113, SEQ ID NO:120, SEQ ID NO:127, or SEQ ID NO:134. In certain embodiments, the arenavirus GP as described herein comprises an amino acid sequence that is 99% identical to the amino acid sequence of SEQ ID NO:1, SEQ ID NO:2, SEQ ID NO:3, SEQ ID NO:4, SEQ ID NO:5, SEQ ID NO:6, SEQ ID NO:48, SEQ ID NO:52, SEQ ID NO:59, SEQ ID NO:66, SEQ ID NO:73, SEQ ID NO:80, SEQ ID NO:84, SEQ ID NO:91, SEQ ID NO:98, SEQ ID NO:105, SEQ ID NO:109, SEQ ID NO: 113, SEQ ID NO:120, SEQ ID NO:127, or SEQ ID NO: 134.

[0082] In certain embodiments, the polypeptide as described herein is arenavirus NP, namely arenavirus nucleoprotein or any nucleoprotein precursor. In certain embodiments, the polypeptide described herein is a wild-type arenavirus nucleoprotein or any wild-type nucleoprotein precursor. In other embodiments, the polypeptide described herein is a recombinant arenavirus nucleoprotein or any recombinant nucleoprotein precursor. In certain embodiments, the arenavirus NP is arenavirus nucleoprotein or any nucleoprotein precursor of LCMV, Lassa virus, Pichinde virus, Oliveros virus, Tamiami virus, Mobala virus, Mopeia virus, Ippy virus, Amapari virus, Flexal virus, Guanarito virus, Latino virus, Machupo virus, Parana virus, Pirital virus, Sabia virus, Tacaribe virus, Bear Canyon virus, Whitewater Arroyo virus, Allpahuayo virus (ALLV), Alxa virus, Chapare virus, Lijiang virus, Cupixi virus, Gairo virus, Loei River virus, Lujo virus, Luna virus, Luli virus, Lunk virus, Mariental virus, Merino Walk virus, Morogoro virus, Okahandja virus, Apore virus, Ryukyu virus, Solwezi virus, souris virus, Wenzhou virus, Big Brushy Tank virus, Catarina virus, Skinner Tank virus, Tonto Creek virus, Xapuri virus, or Junin virus. In certain embodiments, the arenavirus NP as described herein comprises an amino acid sequence that is at least 80%, 85%, 90%, 95%, 96%, 97%, 98%, 99% or 100% identical to the amino acid sequence of SEQ ID NO:7, SEQ ID NO:8, SEQ ID NO:9, SEQ ID NO:10, SEQ ID NO: 11, SEQ ID NO:12, SEQ ID NO:49, SEQ ID NO:56, SEQ ID NO:63, SEQ ID NO:70, SEQ ID NO:77, SEQ ID NO:81, SEQ ID NO:88, SEQ ID NO:95, SEQ ID NO:102, SEQ ID NO:106, SEQ ID NO:110, SEQ ID NO:117, SEQ ID NO:124, SEQ ID NO:131, or SEQ ID NO:138. In certain embodiments, the arenavirus NP as described herein comprises an amino acid sequence that is at least 80% identical to the amino acid sequence of SEQ ID NO:7, SEQ ID NO:8, SEQ ID NO:9, SEQ ID NO:10, SEQ ID NO:11, SEQ ID NO:12, SEQ ID NO:49, SEQ ID NO:56, SEQ ID NO:63, SEQ ID NO:70, SEQ ID NO:77, SEQ ID NO:81, SEQ ID NO:88, SEQ ID NO:95, SEQ ID NO:102, SEQ ID NO:106, SEQ ID NO:110, SEQ ID NO: 117, SEQ ID NO:124, SEQ ID NO:131, or SEQ ID NO:138. In certain embodiments, the arenavirus NP as described herein comprises an amino acid sequence that is at least 85% identical to the amino acid sequence of SEQ ID NO:7, SEQ ID NO:8, SEQ ID NO:9, SEQ ID NO:10, SEQ ID NO:11, SEQ ID NO:12, SEQ ID NO:49, SEQ ID NO:56, SEQ ID NO:63, SEQ ID NO:70, SEQ ID NO:77, SEQ ID NO:81, SEQ ID NO:88, SEQ ID NO:95, SEQ ID NO:102, SEQ ID NO:106, SEQ ID NO:110, SEQ ID NO:117, SEQ ID NO:124, SEQ ID NO:131, or SEQ ID NO:138. In certain embodiments, the arenavirus NP as described herein comprises an amino acid sequence that is at least 90% identical to the amino acid sequence of SEQ ID NO:7, SEQ ID NO:8, SEQ ID NO:9, SEQ ID NO:10, SEQ ID NO: 11, SEQ ID NO:12, SEQ ID NO:49, SEQ ID NO:56, SEQ ID NO:63, SEQ ID NO:70, SEQ ID NO:77, SEQ ID NO:81, SEQ ID NO:88, SEQ ID NO:95, SEQ ID NO:102, SEQ ID NO:106, SEQ ID NO:110, SEQ ID NO:117, SEQ ID NO:124, SEQ ID NO:131, or SEQ ID NO:138. In certain embodiments, the arenavirus NP as described herein comprises an amino acid sequence that is at least 95% identical to the amino acid sequence of SEQ ID NO:7, SEQ ID NO:8, SEQ ID NO:9, SEQ ID NO:10, SEQ ID NO:11, SEQ ID NO:12, SEQ ID NO:49, SEQ ID NO:56, SEQ ID NO:63, SEQ ID NO:70, SEQ ID NO:77, SEQ ID NO:81, SEQ ID NO:88, SEQ ID NO:95, SEQ ID NO:102, SEQ ID NO:106, SEQ ID NO:110, SEQ ID NO:117, SEQ ID NO:124, SEQ ID NO:131, or SEQ ID NO:138. In certain embodiments, the arenavirus NP as described herein comprises an amino acid sequence that is at least 96% identical to the amino acid sequence of SEQ ID NO:7, SEQ ID NO:8, SEQ ID NO:9, SEQ ID NO:10, SEQ ID NO:11, SEQ ID NO:12, SEQ ID NO:49, SEQ ID NO:56, SEQ ID NO:63, SEQ ID NO:70, SEQ ID NO:77, SEQ ID NO:81, SEQ ID NO:88, SEQ ID NO:95, SEQ ID NO:102, SEQ ID NO:106, SEQ ID NO:110, SEQ ID NO:117, SEQ ID NO:124, SEQ ID NO:131, or SEQ ID NO:138. In certain embodiments, the arenavirus NP as described herein comprises an amino acid sequence that is at least 97% identical to the amino acid sequence of SEQ ID NO:7, SEQ ID NO:8, SEQ ID NO:9, SEQ ID NO:10, SEQ ID NO:11, SEQ ID NO:12, SEQ ID NO:49, SEQ ID NO:56, SEQ ID NO:63, SEQ ID NO:70, SEQ ID NO:77, SEQ ID NO:81, SEQ ID NO:88, SEQ ID NO:95, SEQ ID NO:102, SEQ ID NO:106, SEQ ID NO:110, SEQ ID NO: 117, SEQ ID NO:124, SEQ ID NO:131, or SEQ ID NO:138. In certain embodiments, the arenavirus NP as described herein comprises an amino acid sequence that is at least 98% identical to the amino acid sequence of SEQ ID NO:7, SEQ ID NO:8, SEQ ID NO:9, SEQ ID NO:10, SEQ ID NO:11, SEQ ID NO:12, SEQ ID NO:49, SEQ ID NO:56, SEQ ID NO:63, SEQ ID NO:70, SEQ ID NO:77, SEQ ID NO:81, SEQ ID NO:88, SEQ ID NO:95, SEQ ID NO:102, SEQ ID NO:106, SEQ ID NO:110, SEQ ID NO:117, SEQ ID NO:124, SEQ ID NO:131, or SEQ ID NO:138. In certain embodiments, the arenavirus NP as described herein comprises an amino acid sequence that is at least 99% identical to the amino acid sequence of SEQ ID NO:7, SEQ ID NO:8, SEQ ID NO:9, SEQ ID NO:10, SEQ ID NO: 11, SEQ ID NO:12, SEQ ID NO:49, SEQ ID NO:56, SEQ ID NO:63, SEQ ID NO:70, SEQ ID NO:77, SEQ ID NO:81, SEQ ID NO:88, SEQ ID NO:95, SEQ ID NO:102, SEQ ID NO:106, SEQ ID NO:110, SEQ ID NO:117, SEQ ID NO:124, SEQ ID NO:131, or SEQ ID NO:138. In certain embodiments, the arenavirus NP as described herein comprises an amino acid sequence that is 100% identical to the amino acid sequence of SEQ ID NO:7, SEQ ID NO:8, SEQ ID NO:9, SEQ ID NO:10, SEQ ID NO:11, SEQ ID NO:12, SEQ ID NO:49, SEQ ID NO:56, SEQ ID NO:63, SEQ ID NO:70, SEQ ID NO:77, SEQ ID NO:81, SEQ ID NO:88, SEQ ID NO:95, SEQ ID NO:102, SEQ ID NO:106, SEQ ID NO:110, SEQ ID NO:117, SEQ ID NO:124, SEQ ID NO:131, or SEQ ID NO:138. In certain embodiments, the arenavirus NP as described herein comprises an amino acid sequence that is 80% identical to the amino acid sequence of SEQ ID NO:7, SEQ ID NO:8, SEQ ID NO:9, SEQ ID NO:10, SEQ ID NO: 11, SEQ ID NO:12, SEQ ID NO:49, SEQ ID NO:56, SEQ ID NO:63, SEQ ID NO:70, SEQ ID NO:77, SEQ ID NO:81, SEQ ID NO:88, SEQ ID NO:95, SEQ ID NO:102, SEQ ID NO:106, SEQ ID NO:110, SEQ ID NO:117, SEQ ID NO:124, SEQ ID NO:131, or SEQ ID NO:138. In certain embodiments, the arenavirus NP as described herein comprises an amino acid sequence that is 85% identical to the amino acid sequence of SEQ ID NO:7, SEQ ID NO:8, SEQ ID NO:9, SEQ ID NO:10, SEQ ID NO: 11, SEQ ID NO:12, SEQ ID NO:49, SEQ ID NO:56, SEQ ID NO:63, SEQ ID NO:70, SEQ ID NO:77, SEQ ID NO:81, SEQ ID NO:88, SEQ ID NO:95, SEQ ID NO:102, SEQ ID NO:106, SEQ ID NO:110, SEQ ID NO: 117, SEQ ID NO:124, SEQ ID NO:131, or SEQ ID NO:138. In certain embodiments, the arenavirus NP as described herein comprises an amino acid sequence that is 90% identical to the amino acid sequence of SEQ ID NO:7, SEQ ID NO:8, SEQ ID NO:9, SEQ ID NO:10, SEQ ID NO:11, SEQ ID NO:12, SEQ ID NO:49, SEQ ID NO:56, SEQ ID NO:63, SEQ ID NO:70, SEQ ID NO:77, SEQ ID NO:81, SEQ ID NO:88, SEQ ID NO:95, SEQ ID NO:102, SEQ ID NO:106, SEQ ID NO:110, SEQ ID NO:117, SEQ ID NO:124, SEQ ID NO:131, or SEQ ID NO:138. In certain embodiments, the arenavirus NP as described herein comprises an amino acid sequence that is 95% identical to the amino acid sequence of SEQ ID NO:7, SEQ ID NO:8, SEQ ID NO:9, SEQ ID NO:10, SEQ ID NO: 11, SEQ ID NO:12, SEQ ID NO:49, SEQ ID NO:56, SEQ ID NO:63, SEQ ID NO:70, SEQ ID NO:77, SEQ ID NO:81, SEQ ID NO:88, SEQ ID NO:95, SEQ ID NO:102, SEQ ID NO: 106, SEQ ID NO:110, SEQ ID NO: 117, SEQ ID NO:124, SEQ ID NO:131, or SEQ ID NO:138. In certain embodiments, the arenavirus NP as described herein comprises an amino acid sequence that is 96% identical to the amino acid sequence of SEQ ID NO:7, SEQ ID NO:8, SEQ ID NO:9, SEQ ID NO:10, SEQ ID NO:11, SEQ ID NO:12, SEQ ID NO:49, SEQ ID NO:56, SEQ ID NO:63, SEQ ID NO:70, SEQ ID NO:77, SEQ ID NO:81, SEQ ID NO:88, SEQ ID NO:95, SEQ ID NO:102, SEQ ID NO:106, SEQ ID NO:110, SEQ ID NO:117, SEQ ID NO:124, SEQ ID NO:131, or SEQ ID NO:138. In certain embodiments, the arenavirus NP as described herein comprises an amino acid sequence that is 97% identical to the amino acid sequence of SEQ ID NO:7, SEQ ID NO:8, SEQ ID NO:9, SEQ ID NO:10, SEQ ID NO:11, SEQ ID NO:12, SEQ ID NO:49, SEQ ID NO:56, SEQ ID NO:63, SEQ ID NO:70, SEQ ID NO:77, SEQ ID NO:81, SEQ ID NO:88, SEQ ID NO:95, SEQ ID NO:102, SEQ ID NO: 106, SEQ ID NO:110, SEQ ID NO: 117, SEQ ID NO:124, SEQ ID NO:131, or SEQ ID NO:138. In certain embodiments, the arenavirus NP as described herein comprises an amino acid sequence that is 98% identical to the amino acid sequence of SEQ ID NO:7, SEQ ID NO:8, SEQ ID NO:9, SEQ ID NO:10, SEQ ID NO:11, SEQ ID NO:12, SEQ ID NO:49, SEQ ID NO:56, SEQ ID NO:63, SEQ ID NO:70, SEQ ID NO:77, SEQ ID NO:81, SEQ ID NO:88, SEQ ID NO:95, SEQ ID NO:102, SEQ ID NO:106, SEQ ID NO:110, SEQ ID NO:117, SEQ ID NO:124, SEQ ID NO:131, or SEQ ID NO:138. In certain embodiments, the arenavirus NP as described herein comprises an amino acid sequence that is 99% identical to the amino acid sequence of SEQ ID NO:7, SEQ ID NO:8, SEQ ID NO:9, SEQ ID NO:10, SEQ ID NO:11, SEQ ID NO:12, SEQ ID NO:49, SEQ ID NO:56, SEQ ID NO:63, SEQ ID NO:70, SEQ ID NO:77, SEQ ID NO:81, SEQ ID NO:88, SEQ ID NO:95, SEQ ID NO:102, SEQ ID NO: 106, SEQ ID NO:110, SEQ ID NO: 117, SEQ ID NO:124, SEQ ID NO:131, or SEQ ID NO:138.

[0083] In certain embodiments, the polypeptide as described herein is arenavirus Z, namely arenavirus Z protein or any Z protein precursor. In certain embodiments, the polypeptide described herein is a wild-type arenavirus Z protein or any wild-type Z protein precursor. In other embodiments, the polypeptide described herein is a recombinant arenavirus Z protein or any recombinant Z protein precursor. In certain embodiments, the arenavirus Z is arenavirus Z protein or any Z protein precursor of LCMV, Lassa virus, Pichinde virus, Oliveros virus, Tamiami virus, Mobala virus, Mopeia virus, Ippy virus, Amapari virus, Flexal virus, Guanarito virus, Latino virus, Machupo virus, Parana virus, Pirital virus, Sabia virus, Tacaribe virus, Bear Canyon virus, Whitewater Arroyo virus, Allpahuayo virus (ALLV), Alxa virus, Chapare virus, Lijiang virus, Cupixi virus, Gairo virus, Loei River virus, Lujo virus, Luna virus, Luli virus, Lunk virus, Mariental virus, Merino Walk virus, Morogoro virus, Okahandja virus, Apore virus, Ryukyu virus, Solwezi virus, souris virus, Wenzhou virus, Big Brushy Tank virus, Catarina virus, Skinner Tank virus, Tonto Creek virus, Xapuri virus, or Junin virus. In certain embodiments, the arenavirus Z as described herein comprises an amino acid sequence that is at least 80%, 85%, 90%, 95%, 96%, 97%, 98%, 99% or 100% identical to the amino acid sequence of SEQ ID NO:13, SEQ ID NO:14, SEQ ID NO:15, SEQ ID NO:16, SEQ ID NO:17, SEQ ID NO:18, SEQ ID NO:50, SEQ ID NO:57, SEQ ID NO:64, SEQ ID NO:71, SEQ ID NO:78, SEQ ID NO:82, SEQ ID NO:89, SEQ ID NO:96, SEQ ID NO:103, SEQ ID NO:107, SEQ ID NO:111, SEQ ID NO:118, SEQ ID NO:125, SEQ ID NO:132, or SEQ ID NO:139. In certain embodiments, the arenavirus Z as described herein comprises an amino acid sequence that is at least 80% identical to the amino acid sequence of SEQ ID NO:13, SEQ ID NO:14, SEQ ID NO:15, SEQ ID NO:16, SEQ ID NO:17, SEQ ID NO:18, SEQ ID NO:50, SEQ ID NO:57, SEQ ID NO:64, SEQ ID NO:71, SEQ ID NO:78, SEQ ID NO:82, SEQ ID NO:89, SEQ ID NO:96, SEQ ID NO:103, SEQ ID NO:107, SEQ ID NO:111, SEQ ID NO:118, SEQ ID NO:125, SEQ ID NO:132, or SEQ ID NO:139. In certain embodiments, the arenavirus Z as described herein comprises an amino acid sequence that is at least 85% identical to the amino acid sequence of SEQ ID NO:13, SEQ ID NO:14, SEQ ID NO:15, SEQ ID NO:16, SEQ ID NO:17, SEQ ID NO:18, SEQ ID NO:50, SEQ ID NO:57, SEQ ID NO:64, SEQ ID NO:71, SEQ ID NO:78, SEQ ID NO:82, SEQ ID NO:89, SEQ ID NO:96, SEQ ID NO:103, SEQ ID NO:107, SEQ ID NO:111, SEQ ID NO:118, SEQ ID NO:125, SEQ ID NO:132, or SEQ ID NO:139. In certain embodiments, the arenavirus Z as described herein comprises an amino acid sequence that is at least 90% identical to the amino acid sequence of SEQ ID NO:13, SEQ ID NO:14, SEQ ID NO:15, SEQ ID NO:16, SEQ ID NO:17, SEQ ID NO:18, SEQ ID NO:50, SEQ ID NO:57, SEQ ID NO:64, SEQ ID NO:71, SEQ ID NO:78, SEQ ID NO:82, SEQ ID NO:89, SEQ ID NO:96, SEQ ID NO: 103, SEQ ID NO:107, SEQ ID NO:111, SEQ ID NO: 118, SEQ ID NO:125, SEQ ID NO:132, or SEQ ID NO: 139. In certain embodiments, the arenavirus Z as described herein comprises an amino acid sequence that is at least 95% identical to the amino acid sequence of SEQ ID NO:13, SEQ ID NO:14, SEQ ID NO:15, SEQ ID NO:16, SEQ ID NO:17, SEQ ID NO:18, SEQ ID NO:50, SEQ ID NO:57, SEQ ID NO:64, SEQ ID NO:71, SEQ ID NO:78, SEQ ID NO:82, SEQ ID NO:89, SEQ ID NO:96, SEQ ID NO:103, SEQ ID NO:107, SEQ ID NO:111, SEQ ID NO:118, SEQ ID NO:125, SEQ ID NO: 132, or SEQ ID NO:139. In certain embodiments, the arenavirus Z as described herein comprises an amino acid sequence that is at least 96% identical to the amino acid sequence of SEQ ID NO:13, SEQ ID NO:14, SEQ ID NO:15, SEQ ID NO:16, SEQ ID NO:17, SEQ ID NO:18, SEQ ID NO:50, SEQ ID NO:57, SEQ ID NO:64, SEQ ID NO:71, SEQ ID NO:78, SEQ ID NO:82, SEQ ID NO:89, SEQ ID NO:96, SEQ ID NO:103, SEQ ID NO:107, SEQ ID NO:111, SEQ ID NO:118, SEQ ID NO:125, SEQ ID NO:132, or SEQ ID NO:139. In certain embodiments, the arenavirus Z as described herein comprises an amino acid sequence that is at least 97% identical to the amino acid sequence of SEQ ID NO:13, SEQ ID NO:14, SEQ ID NO:15, SEQ ID NO:16, SEQ ID NO:17, SEQ ID NO:18, SEQ ID NO:50, SEQ ID NO:57, SEQ ID NO:64, SEQ ID NO:71, SEQ ID NO:78, SEQ ID NO:82, SEQ ID NO:89, SEQ ID NO:96, SEQ ID NO: 103, SEQ ID NO:107, SEQ ID NO:111, SEQ ID NO: 118, SEQ ID NO:125, SEQ ID NO:132, or SEQ ID NO:139. In certain embodiments, the arenavirus Z as described herein comprises an amino acid sequence that is at least 98% identical to the amino acid sequence of SEQ ID NO:13, SEQ ID NO:14, SEQ ID NO:15, SEQ ID NO:16, SEQ ID NO:17, SEQ ID NO:18, SEQ ID NO:50, SEQ ID NO:57, SEQ ID NO:64, SEQ ID NO:71, SEQ ID NO:78, SEQ ID NO:82, SEQ ID NO:89, SEQ ID NO:96, SEQ ID NO:103, SEQ ID NO:107, SEQ ID NO:111, SEQ ID NO:118, SEQ ID NO:125, SEQ ID NO:132, or SEQ ID NO:139. In certain embodiments, the arenavirus Z as described herein comprises an amino acid sequence that is at least 99% identical to the amino acid sequence of SEQ ID NO:13, SEQ ID NO:14, SEQ ID NO:15, SEQ ID NO:16, SEQ ID NO:17, SEQ ID NO:18, SEQ ID NO:50, SEQ ID NO:57, SEQ ID NO:64, SEQ ID NO:71, SEQ ID NO:78, SEQ ID NO:82, SEQ ID NO:89, SEQ ID NO:96, SEQ ID NO:103, SEQ ID NO:107, SEQ ID NO:111, SEQ ID NO:118, SEQ ID NO:125, SEQ ID NO:132, or SEQ ID NO:139. In certain embodiments, the arenavirus Z as described herein comprises an amino acid sequence that is 100% identical to the amino acid sequence of SEQ ID NO:13, SEQ ID NO:14, SEQ ID NO:15, SEQ ID NO:16, SEQ ID NO:17, SEQ ID NO:18, SEQ ID NO:50, SEQ ID NO:57, SEQ ID NO:64, SEQ ID NO:71, SEQ ID NO:78, SEQ ID NO:82, SEQ ID NO:89, SEQ ID NO:96, SEQ ID NO:103, SEQ ID NO:107, SEQ ID NO:111, SEQ ID NO:118, SEQ ID NO:125, SEQ ID NO:132, or SEQ ID NO: 139. In certain embodiments, the arenavirus Z as described herein comprises an amino acid sequence that is 80% identical to the amino acid sequence of SEQ ID NO:13, SEQ ID NO:14, SEQ ID NO:15, SEQ ID NO:16, SEQ ID NO:17, SEQ ID NO:18, SEQ ID NO:50, SEQ ID NO:57, SEQ ID NO:64, SEQ ID NO:71, SEQ ID NO:78, SEQ ID NO:82, SEQ ID NO:89, SEQ ID NO:96, SEQ ID NO:103, SEQ ID NO:107, SEQ ID NO:111, SEQ ID NO:118, SEQ ID NO:125, SEQ ID NO:132, or SEQ ID NO:139. In certain embodiments, the arenavirus Z as described herein comprises an amino acid sequence that is 85% identical to the amino acid sequence of SEQ ID NO:13, SEQ ID NO:14, SEQ ID NO:15, SEQ ID NO:16, SEQ ID NO:17, SEQ ID NO:18, SEQ ID NO:50, SEQ ID NO:57, SEQ ID NO:64, SEQ ID NO:71, SEQ ID NO:78, SEQ ID NO:82, SEQ ID NO:89, SEQ ID NO:96, SEQ ID NO:103, SEQ ID NO:107, SEQ ID NO:111, SEQ ID NO:118, SEQ ID NO:125, SEQ ID NO:132, or SEQ ID NO:139. In certain embodiments, the arenavirus Z as described herein comprises an amino acid sequence that is 90% identical to the amino acid sequence of SEQ ID NO:13, SEQ ID NO:14, SEQ ID NO:15, SEQ ID NO:16, SEQ ID NO:17, SEQ ID NO:18, SEQ ID NO:50, SEQ ID NO:57, SEQ ID NO:64, SEQ ID NO:71, SEQ ID NO:78, SEQ ID NO:82, SEQ ID NO:89, SEQ ID NO:96, SEQ ID NO:103, SEQ ID NO:107, SEQ ID NO:111, SEQ ID NO:118, SEQ ID NO:125, SEQ ID NO:132, or SEQ ID NO:139. In certain embodiments, the arenavirus Z as described herein comprises an amino acid sequence that is 95% identical to the amino acid sequence of SEQ ID NO:13, SEQ ID NO:14, SEQ ID NO:15, SEQ ID NO:16, SEQ ID NO:17, SEQ ID NO:18, SEQ ID NO:50, SEQ ID NO:57, SEQ ID NO:64, SEQ ID NO:71, SEQ ID NO:78, SEQ ID NO:82, SEQ ID NO:89, SEQ ID NO:96, SEQ ID NO:103, SEQ ID NO:107, SEQ ID NO:111, SEQ ID NO:118, SEQ ID NO:125, SEQ ID NO:132, or SEQ ID NO:139. In certain embodiments, the arenavirus Z as described herein comprises an amino acid sequence that is 96% identical to the amino acid sequence of SEQ ID NO:13, SEQ ID NO:14, SEQ ID NO:15, SEQ ID NO:16, SEQ ID NO:17, SEQ ID NO:18, SEQ ID NO:50, SEQ ID NO:57, SEQ ID NO:64, SEQ ID NO:71, SEQ ID NO:78, SEQ ID NO:82, SEQ ID NO:89, SEQ ID NO:96, SEQ ID NO:103, SEQ ID NO:107, SEQ ID NO:111, SEQ ID NO:118, SEQ ID NO:125, SEQ ID NO:132, or SEQ ID NO:139. In certain embodiments, the arenavirus Z as described herein comprises an amino acid sequence that is 97% identical to the amino acid sequence of SEQ ID NO:13, SEQ ID NO:14, SEQ ID NO:15, SEQ ID NO:16, SEQ ID NO:17, SEQ ID NO:18, SEQ ID NO:50, SEQ ID NO:57, SEQ ID NO:64, SEQ ID NO:71, SEQ ID NO:78, SEQ ID NO:82, SEQ ID NO:89, SEQ ID NO:96, SEQ ID NO:103, SEQ ID NO:107, SEQ ID NO:111, SEQ ID NO:118, SEQ ID NO:125, SEQ ID NO:132, or SEQ ID NO: 139. In certain embodiments, the arenavirus Z as described herein comprises an amino acid sequence that is 98% identical to the amino acid sequence of SEQ ID NO:13, SEQ ID NO:14, SEQ ID NO:15, SEQ ID NO:16, SEQ ID NO:17, SEQ ID NO:18, SEQ ID NO:50, SEQ ID NO:57, SEQ ID NO:64, SEQ ID NO:71, SEQ ID NO:78, SEQ ID NO:82, SEQ ID NO:89, SEQ ID NO:96, SEQ ID NO:103, SEQ ID NO:107, SEQ ID NO:111, SEQ ID NO:118, SEQ ID NO:125, SEQ ID NO:132, or SEQ ID NO:139. In certain embodiments, the arenavirus Z as described herein comprises an amino acid sequence that is 99% identical to the amino acid sequence of SEQ ID NO:13, SEQ ID NO:14, SEQ ID NO:15, SEQ ID NO:16, SEQ ID NO:17, SEQ ID NO:18, SEQ ID NO:50, SEQ ID NO:57, SEQ ID NO:64, SEQ ID NO:71, SEQ ID NO:78, SEQ ID NO:82, SEQ ID NO:89, SEQ ID NO:96, SEQ ID NO:103, SEQ ID NO:107, SEQ ID NO:111, SEQ ID NO:118, SEQ ID NO:125, SEQ ID NO:132, or SEQ ID NO:139.

[0084] In certain embodiments, the polypeptide as described herein is arenavirus L, namely arenavirus L protein or any L protein precursor. In certain embodiments, the polypeptide described herein is a wild-type arenavirus L protein or any wild-type L protein precursor. In other embodiments, the polypeptide described herein is a recombinant arenavirus L protein or any recombinant L protein precursor. In certain embodiments, the arenavirus L is arenavirus L protein or any L protein precursor of LCMV, Lassa virus, Pichinde virus, Oliveros virus, Tamiami virus, Mobala virus, Mopeia virus, Ippy virus, Amapari virus, Flexal virus, Guanarito virus, Latino virus, Machupo virus, Parana virus, Pirital virus, Sabia virus, Tacaribe virus, Bear Canyon virus, Whitewater Arroyo virus, Allpahuayo virus (ALLV), Alxa virus, Chapare virus, Lijiang virus, Cupixi virus, Gairo virus, Loei River virus, Lujo virus, Luna virus, Luli virus, Lunk virus, Mariental virus, Merino Walk virus, Morogoro virus, Okahandja virus, Apore virus, Ryukyu virus, Solwezi virus, souris virus, Wenzhou virus, Big Brushy Tank virus, Catarina virus, Skinner Tank virus, Tonto Creek virus, Xapuri virus, or Junin virus. In certain embodiments, the arenavirus L as described herein comprises an amino acid sequence that is at least 80%, 85%, 90%, 95%, 96%, 97%, 98%, 99% or 100% identical to the amino acid sequence of SEQ ID NO:19, SEQ ID NO:20, SEQ ID NO:21, SEQ ID NO:22, SEQ ID NO:23, SEQ ID NO:24, SEQ ID NO:51, SEQ ID NO:58, SEQ ID NO:65, SEQ ID NO:72, SEQ ID NO:79, SEQ ID NO:83, SEQ ID NO:90, SEQ ID NO:97, SEQ ID NO:104, SEQ ID NO:108, SEQ ID NO:112, SEQ ID NO:119, SEQ ID NO:126, SEQ ID NO:133, or SEQ ID NO:140. In certain embodiments, the arenavirus L as described herein comprises an amino acid sequence that is at least 80% identical to the amino acid sequence of SEQ ID NO:19, SEQ ID NO:20, SEQ ID NO:21, SEQ ID NO:22, SEQ ID NO:23, SEQ ID NO:24, SEQ ID NO:51, SEQ ID NO:58, SEQ ID NO:65, SEQ ID NO:72, SEQ ID NO:79, SEQ ID NO:83, SEQ ID NO:90, SEQ ID NO:97, SEQ ID NO:104, SEQ ID NO:108, SEQ ID NO: 112, SEQ ID NO: 119, SEQ ID NO:126, SEQ ID NO:133, or SEQ ID NO:140. In certain embodiments, the arenavirus L as described herein comprises an amino acid sequence that is at least 85% identical to the amino acid sequence of SEQ ID NO:19, SEQ ID NO:20, SEQ ID NO:21, SEQ ID NO:22, SEQ ID NO:23, SEQ ID NO:24, SEQ ID NO:51, SEQ ID NO:58, SEQ ID NO:65, SEQ ID NO:72, SEQ ID NO:79, SEQ ID NO:83, SEQ ID NO:90, SEQ ID NO:97, SEQ ID NO:104, SEQ ID NO:108, SEQ ID NO:112, SEQ ID NO:119, SEQ ID NO:126, SEQ ID NO:133, or SEQ ID NO:140. In certain embodiments, the arenavirus L as described herein comprises an amino acid sequence that is at least 90% identical to the amino acid sequence of SEQ ID NO:19, SEQ ID NO:20, SEQ ID NO:21, SEQ ID NO:22, SEQ ID NO:23, SEQ ID NO:24, SEQ ID NO:51, SEQ ID NO:58, SEQ ID NO:65, SEQ ID NO:72, SEQ ID NO:79, SEQ ID NO:83, SEQ ID NO:90, SEQ ID NO:97, SEQ ID NO:104, SEQ ID NO:108, SEQ ID NO:112, SEQ ID NO: 119, SEQ ID NO:126, SEQ ID NO:133, or SEQ ID NO:140. In certain embodiments, the arenavirus L as described herein comprises an amino acid sequence that is at least 95% identical to the amino acid sequence of SEQ ID NO:19, SEQ ID NO:20, SEQ ID NO:21, SEQ ID NO:22, SEQ ID NO:23, SEQ ID NO:24, SEQ ID NO:51, SEQ ID NO:58, SEQ ID NO:65, SEQ ID NO:72, SEQ ID NO:79, SEQ ID NO:83, SEQ ID NO:90, SEQ ID NO:97, SEQ ID NO:104, SEQ ID NO:108, SEQ ID NO:112, SEQ ID NO:119, SEQ ID NO:126, SEQ ID NO:133, or SEQ ID NO:140. In certain embodiments, the arenavirus L as described herein comprises an amino acid sequence that is at least 96% identical to the amino acid sequence of SEQ ID NO:19, SEQ ID NO:20, SEQ ID NO:21, SEQ ID NO:22, SEQ ID NO:23, SEQ ID NO:24, SEQ ID NO:51, SEQ ID NO:58, SEQ ID NO:65, SEQ ID NO:72, SEQ ID NO:79, SEQ ID NO:83, SEQ ID NO:90, SEQ ID NO:97, SEQ ID NO:104, SEQ ID NO:108, SEQ ID NO:112, SEQ ID NO:119, SEQ ID NO:126, SEQ ID NO:133, or SEQ ID NO:140. In certain embodiments, the arenavirus L as described herein comprises an amino acid sequence that is at least 97% identical to the amino acid sequence of SEQ ID NO:19, SEQ ID NO:20, SEQ ID NO:21, SEQ ID NO:22, SEQ ID NO:23, SEQ ID NO:24, SEQ ID NO:51, SEQ ID NO:58, SEQ ID NO:65, SEQ ID NO:72, SEQ ID NO:79, SEQ ID NO:83, SEQ ID NO:90, SEQ ID NO:97, SEQ ID NO:104, SEQ ID NO:108, SEQ ID NO:112, SEQ ID NO: 119, SEQ ID NO:126, SEQ ID NO:133, or SEQ ID NO:140. In certain embodiments, the arenavirus L as described herein comprises an amino acid sequence that is at least 98% identical to the amino acid sequence of SEQ ID NO:19, SEQ ID NO:20, SEQ ID NO:21, SEQ ID NO:22, SEQ ID NO:23, SEQ ID NO:24, SEQ ID NO:51, SEQ ID NO:58, SEQ ID NO:65, SEQ ID NO:72, SEQ ID NO:79, SEQ ID NO:83, SEQ ID NO:90, SEQ ID NO:97, SEQ ID NO:104, SEQ ID NO:108, SEQ ID NO:112, SEQ ID NO:119, SEQ ID NO:126, SEQ ID NO:133, or SEQ ID NO:140. In certain embodiments, the arenavirus L as described herein comprises an amino acid sequence that is at least 99% identical to the amino acid sequence of SEQ ID NO:19, SEQ ID NO:20, SEQ ID NO:21, SEQ ID NO:22, SEQ ID NO:23, SEQ ID NO:24, SEQ ID NO:51, SEQ ID NO:58, SEQ ID NO:65, SEQ ID NO:72, SEQ ID NO:79, SEQ ID NO:83, SEQ ID NO:90, SEQ ID NO:97, SEQ ID NO:104, SEQ ID NO:108, SEQ ID NO:112, SEQ ID NO:119, SEQ ID NO:126, SEQ ID NO:133, or SEQ ID NO:140. In certain embodiments, the arenavirus L as described herein comprises an amino acid sequence that is 100% identical to the amino acid sequence of SEQ ID NO:19, SEQ ID NO:20, SEQ ID NO:21, SEQ ID NO:22, SEQ ID NO:23, SEQ ID NO:24, SEQ ID NO:51, SEQ ID NO:58, SEQ ID NO:65, SEQ ID NO:72, SEQ ID NO:79, SEQ ID NO:83, SEQ ID NO:90, SEQ ID NO:97, SEQ ID NO:104, SEQ ID NO:108, SEQ ID NO:112, SEQ ID NO:119, SEQ ID NO:126, SEQ ID NO:133, or SEQ ID NO: 140. In certain embodiments, the arenavirus L as described herein comprises an amino acid sequence that is 80% identical to the amino acid sequence of SEQ ID NO:19, SEQ ID NO:20, SEQ ID NO:21, SEQ ID NO:22, SEQ ID NO:23, SEQ ID NO:24, SEQ ID NO:51, SEQ ID NO:58, SEQ ID NO:65, SEQ ID NO:72, SEQ ID NO:79, SEQ ID NO:83, SEQ ID NO:90, SEQ ID NO:97, SEQ ID NO:104, SEQ ID NO:108, SEQ ID NO: 112, SEQ ID NO: 119, SEQ ID NO:126, SEQ ID NO:133, or SEQ ID NO:140. In certain embodiments, the arenavirus L as described herein comprises an amino acid sequence that is 85% identical to the amino acid sequence of SEQ ID NO:19, SEQ ID NO:20, SEQ ID NO:21, SEQ ID NO:22, SEQ ID NO:23, SEQ ID NO:24, SEQ ID NO:51, SEQ ID NO:58, SEQ ID NO:65, SEQ ID NO:72, SEQ ID NO:79, SEQ ID NO:83, SEQ ID NO:90, SEQ ID NO:97, SEQ ID NO:104, SEQ ID NO:108, SEQ ID NO:112, SEQ ID NO:119, SEQ ID NO:126, SEQ ID NO:133, or SEQ ID NO:140. In certain embodiments, the arenavirus L as described herein comprises an amino acid sequence that is 90% identical to the amino acid sequence of SEQ ID NO:19, SEQ ID NO:20, SEQ ID NO:21, SEQ ID NO:22, SEQ ID NO:23, SEQ ID NO:24, SEQ ID NO:51, SEQ ID NO:58, SEQ ID NO:65, SEQ ID NO:72, SEQ ID NO:79, SEQ ID NO:83, SEQ ID NO:90, SEQ ID NO:97, SEQ ID NO:104, SEQ ID NO:108, SEQ ID NO: 112, SEQ ID NO: 119, SEQ ID NO:126, SEQ ID NO:133, or SEQ ID NO:140. In certain embodiments, the arenavirus L as described herein comprises an amino acid sequence that is 95% identical to the amino acid sequence of SEQ ID NO:19, SEQ ID NO:20, SEQ ID NO:21, SEQ ID NO:22, SEQ ID NO:23, SEQ ID NO:24, SEQ ID NO:51, SEQ ID NO:58, SEQ ID NO:65, SEQ ID NO:72, SEQ ID NO:79, SEQ ID NO:83, SEQ ID NO:90, SEQ ID NO:97, SEQ ID NO:104, SEQ ID NO:108, SEQ ID NO:112, SEQ ID NO:119, SEQ ID NO:126, SEQ ID NO:133, or SEQ ID NO:140. In certain embodiments, the arenavirus L as described herein comprises an amino acid sequence that is 96% identical to the amino acid sequence of SEQ ID NO:19, SEQ ID NO:20, SEQ ID NO:21, SEQ ID NO:22, SEQ ID NO:23, SEQ ID NO:24, SEQ ID NO:51, SEQ ID NO:58, SEQ ID NO:65, SEQ ID NO:72, SEQ ID NO:79, SEQ ID NO:83, SEQ ID NO:90, SEQ ID NO:97, SEQ ID NO:104, SEQ ID NO:108, SEQ ID NO: 112, SEQ ID NO:119, SEQ ID NO:126, SEQ ID NO:133, or SEQ ID NO:140. In certain embodiments, the arenavirus L as described herein comprises an amino acid sequence that is 97% identical to the amino acid sequence of SEQ ID NO:19, SEQ ID NO:20, SEQ ID NO:21, SEQ ID NO:22, SEQ ID NO:23, SEQ ID NO:24, SEQ ID NO:51, SEQ ID NO:58, SEQ ID NO:65, SEQ ID NO:72, SEQ ID NO:79, SEQ ID NO:83, SEQ ID NO:90, SEQ ID NO:97, SEQ ID NO:104, SEQ ID NO:108, SEQ ID NO: 112, SEQ ID NO: 119, SEQ ID NO:126, SEQ ID NO:133, or SEQ ID NO: 140. In certain embodiments, the arenavirus L as described herein comprises an amino acid sequence that is 98% identical to the amino acid sequence of SEQ ID NO:19, SEQ ID NO:20, SEQ ID NO:21, SEQ ID NO:22, SEQ ID NO:23, SEQ ID NO:24, SEQ ID NO:51, SEQ ID NO:58, SEQ ID NO:65, SEQ ID NO:72, SEQ ID NO:79, SEQ ID NO:83, SEQ ID NO:90, SEQ ID NO:97, SEQ ID NO:104, SEQ ID NO:108, SEQ ID NO:112, SEQ ID NO:119, SEQ ID NO:126, SEQ ID NO:133, or SEQ ID NO:140. In certain embodiments, the arenavirus L as described herein comprises an amino acid sequence that is 99% identical to the amino acid sequence of SEQ ID NO:19, SEQ ID NO:20, SEQ ID NO:21, SEQ ID NO:22, SEQ ID NO:23, SEQ ID NO:24, SEQ ID NO:51, SEQ ID NO:58, SEQ ID NO:65, SEQ ID NO:72, SEQ ID NO:79, SEQ ID NO:83, SEQ ID NO:90, SEQ ID NO:97, SEQ ID NO:104, SEQ ID NO:108, SEQ ID NO: 112, SEQ ID NO: 119, SEQ ID NO:126, SEQ ID NO:133, or SEQ ID NO:140.

### 5.2 Functional Fragment Provided Herein

[0085] The functional fragment to be used in the compositions and methods described herein is a fragment of a polypeptide. The functional fragment of a polypeptide as described herein is not the full-length polypeptide. In certain embodiments, the functional fragment is fused to a buffer peptide (as described in Section 5.4). In more specific embodiments, following translation of the functional fragment and the buffer peptide, a peptidase can cleave the functional fragment/buffer peptide fusion close to or at the fusion site. In some embodiments, the functional fragment is a GP signal peptide (or functional fragment thereof or polypeptide comprising the GP signal peptide or functional fragment thereof) and the GP signal peptide (or functional fragment thereof or polypeptide comprising the GP signal peptide or functional fragment thereof) is fused to a buffer peptide (as described in Section 5.4). In more specific embodiments, following translation of the GP signal peptide (or functional fragment thereof or polypeptide comprising the GP signal peptide or functional fragment thereof) and the buffer peptide, a peptidase can cleave the GP signal peptide (or functional fragment thereof or polypeptide comprising the GP signal peptide or functional fragment thereof)/buffer peptide fusion close to (eg, −5, −4, −3, −2, −1, +1, +2, +3, +4, or +5 amino acid position from the fusion site) or at the fusion site.

[0086] In certain embodiments, the functional fragment is a fragment of an arenavirus glycoprotein precursor. In certain embodiments, the functional fragment is an arenavirus GP signal peptide fused to a buffer peptide (as described in Section 5.4). In certain embodiments, the arenavirus GP signal peptide fused to a buffer peptide as described herein comprises an amino acid sequence that is at least 80%, 85%, 90%, 95%, 96%, 97%, 98%, 99% or 100% identical to a portion of the amino acid sequence of SEQ ID NO:1, SEQ ID NO:2, SEQ ID NO:3, SEQ ID NO:4, SEQ ID NO:5, SEQ ID NO:6, SEQ ID NO:48, SEQ ID NO:52, SEQ ID NO:59, SEQ ID NO:66, SEQ ID NO:73, SEQ ID NO:80, SEQ ID NO:84, SEQ ID NO:91, SEQ ID NO:98, SEQ ID NO:105, SEQ ID NO:109, SEQ ID NO:113, SEQ ID NO:120, SEQ ID NO:127, or SEQ ID NO:134. In certain embodiments, the arenavirus GP signal peptide fused to a buffer peptide as described herein comprises an amino acid sequence that is at least 80% identical to a portion of the amino acid sequence of SEQ ID NO:1, SEQ ID NO:2, SEQ ID NO:3, SEQ ID NO:4, SEQ ID NO:5, SEQ ID NO:6, SEQ ID NO:48, SEQ ID NO:52, SEQ ID NO:59, SEQ ID NO:66, SEQ ID NO:73, SEQ ID NO:80, SEQ ID NO:84, SEQ ID NO:91, SEQ ID NO:98, SEQ ID NO:105, SEQ ID NO:109, SEQ ID NO:113, SEQ ID NO:120, SEQ ID NO:127, or SEQ ID NO:134. In certain embodiments, the arenavirus GP signal peptide fused to a buffer peptide as described herein comprises an amino acid sequence that is at least 85% identical to a portion of the amino acid sequence of SEQ ID NO:1, SEQ ID NO:2, SEQ ID NO:3, SEQ ID NO:4, SEQ ID NO:5, SEQ ID NO:6, SEQ ID NO:48, SEQ ID NO:52, SEQ ID NO:59, SEQ ID NO:66, SEQ ID NO:73, SEQ ID NO:80, SEQ ID NO:84, SEQ ID NO:91, SEQ ID NO:98, SEQ ID NO:105, SEQ ID NO:109, SEQ ID NO:113, SEQ ID NO:120, SEQ ID NO:127, or SEQ ID NO:134. In certain embodiments, the arenavirus GP signal peptide fused to a buffer peptide as described herein comprises an amino acid sequence that is at least 90% identical to a portion of the amino acid sequence of SEQ ID NO:1, SEQ ID NO:2, SEQ ID NO:3, SEQ ID NO:4, SEQ ID NO:5, SEQ ID NO:6, SEQ ID NO:48, SEQ ID NO:52, SEQ ID NO:59, SEQ ID NO:66, SEQ ID NO:73, SEQ ID NO:80, SEQ ID NO:84, SEQ ID NO:91, SEQ ID NO:98, SEQ ID NO:105, SEQ ID NO:109, SEQ ID NO:113, SEQ ID NO:120, SEQ ID NO:127, or SEQ ID NO:134. In certain embodiments, the arenavirus GP signal peptide fused to a buffer peptide as described herein comprises an amino acid sequence that is at least 95% identical to a portion of the amino acid sequence of SEQ ID NO:1, SEQ ID NO:2, SEQ ID NO:3, SEQ ID NO:4, SEQ ID NO:5, SEQ ID NO:6, SEQ ID NO:48, SEQ ID NO:52, SEQ ID NO:59, SEQ ID NO:66, SEQ ID NO:73, SEQ ID NO:80, SEQ ID NO:84, SEQ ID NO:91, SEQ ID NO:98, SEQ ID NO:105, SEQ ID NO:109, SEQ ID NO: 113, SEQ ID NO:120, SEQ ID NO:127, or SEQ ID NO:134. In certain embodiments, the arenavirus GP signal peptide fused to a buffer peptide as described herein comprises an amino acid sequence that is at least 96% identical to a portion of the amino acid sequence of SEQ ID NO:1, SEQ ID NO:2, SEQ ID NO:3, SEQ ID NO:4, SEQ ID NO:5, SEQ ID NO:6, SEQ ID NO:48, SEQ ID NO:52, SEQ ID NO:59, SEQ ID NO:66, SEQ ID NO:73, SEQ ID NO:80, SEQ ID NO:84, SEQ ID NO:91, SEQ ID NO:98, SEQ ID NO:105, SEQ ID NO:109, SEQ ID NO:113, SEQ ID NO:120, SEQ ID NO:127, or SEQ ID NO:134. In certain embodiments, the arenavirus GP signal peptide fused to a buffer peptide as described herein comprises an amino acid sequence that is at least 97% identical to a portion of the amino acid sequence of SEQ ID NO:1, SEQ ID NO:2, SEQ ID NO:3, SEQ ID NO:4, SEQ ID NO:5, SEQ ID NO:6, SEQ ID NO:48, SEQ ID NO:52, SEQ ID NO:59, SEQ ID NO:66, SEQ ID NO:73, SEQ ID NO:80, SEQ ID NO:84, SEQ ID NO:91, SEQ ID NO:98, SEQ ID NO:105, SEQ ID NO:109, SEQ ID NO:113, SEQ ID NO:120, SEQ ID NO:127, or SEQ ID NO:134. In certain embodiments, the arenavirus GP signal peptide fused to a buffer peptide as described herein comprises an amino acid sequence that is at least 98% identical to a portion of the amino acid sequence of SEQ ID NO:1, SEQ ID NO:2, SEQ ID NO:3, SEQ ID NO:4, SEQ ID NO:5, SEQ ID NO:6, SEQ ID NO:48, SEQ ID NO:52, SEQ ID NO:59, SEQ ID NO:66, SEQ ID NO:73, SEQ ID NO:80, SEQ ID NO:84, SEQ ID NO:91, SEQ ID NO:98, SEQ ID NO:105, SEQ ID NO: 109, SEQ ID NO: 113, SEQ ID NO:120, SEQ ID NO:127, or SEQ ID NO:134. In certain embodiments, the arenavirus GP signal peptide fused to a buffer peptide as described herein comprises an amino acid sequence that is at least 99% identical to a portion of the amino acid sequence of SEQ ID NO:1, SEQ ID NO:2, SEQ ID NO:3, SEQ ID NO:4, SEQ ID NO:5, SEQ ID NO:6, SEQ ID NO:48, SEQ ID NO:52, SEQ ID NO:59, SEQ ID NO:66, SEQ ID NO:73, SEQ ID NO:80, SEQ ID NO:84, SEQ ID NO:91, SEQ ID NO:98, SEQ ID NO:105, SEQ ID NO:109, SEQ ID NO:113, SEQ ID NO:120, SEQ ID NO:127, or SEQ ID NO:134. In certain embodiments, the arenavirus GP signal peptide fused to a buffer peptide as described herein comprises an amino acid sequence that is 100% identical to a portion of the amino acid sequence of SEQ ID NO:1, SEQ ID NO:2, SEQ ID NO:3, SEQ ID NO:4, SEQ ID NO:5, SEQ ID NO:6, SEQ ID NO:48, SEQ ID NO:52, SEQ ID NO:59, SEQ ID NO:66, SEQ ID NO:73, SEQ ID NO:80, SEQ ID NO:84, SEQ ID NO:91, SEQ ID NO:98, SEQ ID NO:105, SEQ ID NO:109, SEQ ID NO:113, SEQ ID NO:120, SEQ ID NO: 127, or SEQ ID NO:134. In some embodiments, the portion of the amino acid sequence is any portion of a sequence and can range in the number of amino acids. In some embodiments, the portion of the amino acid sequence is from about amino acid 1 to about amino acid 5, from about amino acid 1 to about amino acid 10, from about amino acid 1 to about amino acid 15, from about amino acid 1 to about amino acid 20, from about amino acid 1 to about amino acid 25, from about amino acid 1 to about amino acid 30, from about amino acid 1 to about amino acid 35, from about amino acid 1 to about amino acid 40, from about amino acid 1 to about amino acid 45, from about amino acid 1 to about amino acid 50, from about amino acid 1 to about amino acid 51, from about amino acid 1 to about amino acid 52, from about amino acid 1 to about amino acid 53, from about amino acid 1 to about amino acid 54, from about amino acid 1 to about amino acid 55, from about amino acid 1 to about amino acid 56, from about amino acid 1 to about amino acid 57, from about amino acid 1 to about amino acid 58, from about amino acid 1 to about amino acid 59, from about amino acid 1 to about amino acid 60, from about amino acid 1 to about amino acid 61, from about amino acid 1 to about amino acid 62, from about amino acid 1 to about amino acid 63, from about amino acid 1 to about amino acid 64, from about amino acid 1 to about amino acid 65, from about amino acid 1 to about amino acid 66, from about amino acid 1 to about amino acid 67, from about amino acid 1 to about amino acid 68, from about amino acid 1 to about amino acid 69, from about amino acid 1 to about amino acid 70, from about amino acid 1 to about amino acid 71, from about amino acid 1 to about amino acid 72, from about amino acid 1 to about amino acid 73, from about amino acid 1 to about amino acid 74, from about amino acid 1 to about amino acid 75, from about amino acid 1 to about amino acid 76, from about amino acid 1 to about amino acid 77, from about amino acid 1 to about amino acid 78, from about amino acid 1 to about amino acid 79, from about amino acid 1 to about amino acid 80, from about amino acid 1 to about amino acid 81, from about amino acid 1 to about amino acid 82, from about amino acid 1 to about amino acid 83, from about amino acid 1 to about amino acid 84, from about amino acid 1 to about amino acid 85, from about amino acid 1 to about amino acid 86, from about amino acid 1 to about amino acid 87, from about amino acid 1 to about amino acid 88, from about amino acid 1 to about amino acid 89, from about amino acid 1 to about amino acid 90, from about amino acid 1 to about amino acid 91, from about amino acid 1 to about amino acid 92, from about amino acid 1 to about amino acid 93, from about amino acid 1 to about amino acid 94, from about amino acid 1 to about amino acid 95, from about amino acid 1 to about amino acid 96, from about amino acid 1 to about amino acid 97, from about amino acid 1 to about amino acid 98, from about amino acid 1 to about amino acid 99, from about amino acid 1 to about amino acid 100, from about amino acid 1 to about amino acid 101, from about amino acid 1 to about amino acid 102, from about amino acid 1 to about amino acid 103, from about amino acid 1 to about amino acid 104, from about amino acid 1 to about amino acid 105, from about amino acid 1 to about amino acid 106, from about amino acid 1 to about amino acid 107, from about amino acid 1 to about amino acid 108, from about amino acid 1 to about amino acid 109, from about amino acid 1 to about amino acid 110, from about amino acid 1 to about amino acid 111, from about amino acid 1 to about amino acid 112, from about amino acid 1 to about amino acid 113, or from about amino acid 1 to about more than amino acid 114 (e.g., 115, 120, 125, 130, 135, 140, 145, 150, 200, 250, 300, etc.) of SEQ ID NO:1, SEQ ID NO:2, SEQ ID NO:3, SEQ ID NO:4, SEQ ID NO:5, SEQ ID NO:6, SEQ ID NO:48, SEQ ID NO:52, SEQ ID NO:59, SEQ ID NO:66, SEQ ID NO:73, SEQ ID NO:80, SEQ ID NO:84, SEQ ID NO:91, SEQ ID NO:98, SEQ ID NO:105, SEQ ID NO:109, SEQ ID NO:113, SEQ ID NO:120, SEQ ID NO:127, or SEQ ID NO:134, or an arenavirus glycoprotein precursor sequence. In some embodiments, the portion of the amino acid sequence includes or is from about amino acid 1 to about amino acid 66 of SEQ ID NO:3. In some embodiments, the portion of the amino acid sequence includes or is from about amino acid 1 to about amino acid 81 of SEQ ID NO:3. In some embodiments, the portion of the amino acid sequence includes or is from about amino acid 1 to about amino acid 113 of SEQ ID NO:3.

[0087] In certain embodiments, the functional fragment may possess one or more functions that is known to a person of ordinary skills in the art. In certain embodiments, the functional fragment may possess the biological functions of the polypeptide from which the functional fragment is derived, for example the biological functions required for growth of the arenavirus particle. In certain embodiments, the functional fragment can support the biological functions of the polypeptide from which it is derived as a separated fragment independent of the context of the full-length polypeptide. In an exemplary embodiment, the functional fragment may be a signal peptide that possesses a function of mediating the insertion of glycoprotein precursor into the membrane of the endoplasmic reticulum (ER). In further embodiments, besides mediating the insertion of glycoprotein precursor into the membrane of the ER, the signal peptide may possess other functions, for example mediating cleavage of the polypeptide and/or acting as a trans-acting maturation factor. In other embodiments, the functional fragment may not possess any function that is known to a person of ordinary skills in the art.

[0088] In certain embodiments, the functional fragment may be 5, 8, 10, 12, 15, 18, 20, 22, 25, 28, 30, 32, 35, 38, 40, 42, 45, 48, 50, 52, 55, 58, 60, 65, 70, 75, 80, 85, 90, 95, 100, 150, 200, 250, or 300 amino acids in length. In certain embodiments, the functional fragment is 5 to 10 amino acids in length, 10 to 25 amino acids in length, 25 to 50 amino acids in length, 50 to 100 amino acids in length, 100 to 150 amino acids in length, 150 to 200 amino acids in length, 200 to 250 amino acids in length, 250 to 300 amino acids in length, 300 to 400 amino acids in length, 400 to 500 amino acids in length, 500 to 750 amino acids in length, 750 to 1000 amino acids in length, 1000 to 1250 amino acids in length, 1250 to 1500 amino acids in length, 1500 to 1750 amino acids in length, 1750 to 2000 amino acids in length, 2000 to 2500 amino acids in length, or more than 2500 or more amino acids in length. In certain embodiments, the functional fragment does not exceed 2500 amino acids in length.

[0089] In certain embodiments, the functional fragment may consist of 5, 8, 10, 12, 15, 18, 20, 22, 25, 28, 30, 32, 35, 38, 40, 42, 45, 48, 50, 52, 55, 58, 60, 65, 70, 75, 80, 85, 90, 95, 100, 150, 200, 250, or 300 amino-acid residues. In certain embodiments, the functional fragment may consist of 58 amino-acid residues. In certain embodiments, the functional fragment may consist of 193 amino-acid residues. In certain embodiments, the functional fragment may consist of 200 amino-acid residues. In certain embodiments, the functional fragment may consist of 201 amino-acid residues. In certain embodiments, the functional fragment may consist of 207 amino-acid residues. In certain embodiments, the functional fragment may consist of 215 amino-acid residues. In certain embodiments, the functional fragment may consist of 225 amino-acid residues. In certain embodiments, the functional fragment may consist of 232 amino-acid residues. In certain embodiments, the functional fragment may consist of 233 amino-acid residues. In certain embodiments, the functional fragment may consist of 234 amino-acid residues. In certain embodiments, the functional fragment may consist of 235 amino-acid residues. In certain embodiments, the functional fragment may consist of 15 amino-acid residues. In certain embodiments, the functional fragment may consist of 20 amino-acid residues. In certain embodiments, the functional fragment may consist of 1 to 15 amino-acid residues. In certain embodiments, the functional fragment may consist of 2 to 20 amino-acid residues.

[0090] In certain embodiments, the functional fragment is a fragment of arenavirus GP, NP, Z, or L, namely a fragment of arenavirus glycoprotein, nucleoprotein, Z protein, L protein, glycoprotein precursor, nucleoprotein precursor, Z protein precursor, or L protein precursor. In certain embodiments, the functional fragment of arenavirus GP, NP, Z, or L is wild-type. In other embodiments, the functional fragment of arenavirus GP, NP, Z, and L is recombinant. In certain embodiments, the functional fragment of arenavirus GP, NP, Z, or L is mutated. In certain embodiments, the functional fragment of arenavirus GP, NP, Z, or L is derived from an attenuated virus.

[0091] In certain embodiments, the functional fragment is a fragment of wild-type arenavirus glycoprotein, nucleoprotein, Z protein, or L protein. In certain embodiments, the functional fragment is a fragment of wild-type arenavirus glycoprotein. In certain embodiments, the functional fragment is a fragment of wild-type arenavirus nucleoprotein. In certain embodiments, the functional fragment is a fragment of wild-type arenavirus Z protein. In certain embodiments, the functional fragment is a fragment of wild-type arenavirus L protein.

[0092] In certain embodiments, the functional fragment is a fragment of wild-type arenavirus glycoprotein precursor, nucleoprotein precursor, Z protein precursor, or L protein precursor. In certain embodiments, the functional fragment is a fragment of wild-type arenavirus glycoprotein precursor. In certain embodiments, the wild-type arenavirus glycoprotein precursor can be processed into a GP signal peptide, a GP1 and a GP2. In certain embodiments, the functional fragment is a fragment of wild-type arenavirus nucleoprotein precursor. In certain embodiments, the functional fragment is a fragment of wild-type arenavirus Z protein precursor. In certain embodiments, the functional fragment is a fragment of wild-type arenavirus L protein precursor.

[0093] In certain embodiments, the functional fragment is a fragment of recombinant arenavirus glycoprotein, nucleoprotein, Z protein or L protein. In certain embodiments, the functional fragment is a fragment of recombinant arenavirus glycoprotein. In certain embodiments, the functional fragment is a fragment of recombinant arenavirus nucleoprotein. In certain embodiments, the functional fragment is a fragment of recombinant arenavirus Z protein. In certain embodiments, the functional fragment is a fragment of recombinant arenavirus L protein.

[0094] In certain embodiments, the functional fragment is recombinant arenavirus glycoprotein precursor, nucleoprotein precursor, Z protein precursor or L protein precursor. In certain embodiments, the functional fragment is a fragment of recombinant arenavirus glycoprotein precursor. In certain embodiments, the arenavirus glycoprotein precursor can be processed into a GP signal peptide, a GP1 and a GP2, one or more of which may be recombinant. In certain embodiments, the functional fragment is a fragment of recombinant arenavirus nucleoprotein precursor. In certain embodiments, the functional fragment is a fragment of recombinant arenavirus Z protein precursor. In certain embodiments, the functional fragment is a fragment of recombinant arenavirus L protein precursor.

[0095] In certain embodiments, the functional fragment is a fragment of mutated arenavirus glycoprotein, nucleoprotein, Z protein or L protein. In certain embodiments, the functional fragment is a fragment of mutated arenavirus glycoprotein. In certain embodiments, the functional fragment is a fragment of mutated arenavirus nucleoprotein. In certain embodiments, the functional fragment is a fragment of mutated arenavirus Z protein. In certain embodiments, the functional fragment is a fragment of mutated arenavirus L protein.

[0096] In certain embodiments, the functional fragment is mutated arenavirus glycoprotein precursor, nucleoprotein precursor, Z protein precursor or L protein precursor. In certain embodiments, the functional fragment is a fragment of mutated arenavirus glycoprotein precursor. In certain embodiments, the arenavirus glycoprotein precursor can be processed into a GP signal peptide, a GP1 and a GP2, one or more of which may be mutated. In certain embodiments, the functional fragment is a fragment of mutated arenavirus nucleoprotein precursor. In certain embodiments, the functional fragment is a fragment of mutated arenavirus Z protein precursor. In certain embodiments, the functional fragment is a fragment of mutated arenavirus L protein precursor.

[0097] In certain embodiments, the functional fragment is a fragment of arenavirus glycoprotein, nucleoprotein, Z protein or L protein that is derived from an attenuated virus. In certain embodiments, the functional fragment is a fragment of arenavirus glycoprotein derived from an attenuated virus. In certain embodiments, the functional fragment is a fragment of arenavirus nucleoprotein derived from an attenuated virus. In certain embodiments, the functional fragment is a fragment of arenavirus Z protein derived from an attenuated virus. In certain embodiments, the functional fragment is a fragment of arenavirus L protein derived from an attenuated virus.

[0098] In certain embodiments, the functional fragment is arenavirus glycoprotein precursor, nucleoprotein precursor, Z protein precursor or L protein precursor that is derived from an attenuated virus. In certain embodiments, the functional fragment is a fragment of arenavirus glycoprotein precursor derived from an attenuated virus. In certain embodiments, the arenavirus glycoprotein precursor can be processed into a GP signal peptide, a GP1 and a GP2, one or more of which may be derived from an attenuated virus. In certain embodiments, the functional fragment is a fragment of arenavirus nucleoprotein precursor derived from an attenuated virus. In certain embodiments, the functional fragment is a fragment of arenavirus Z protein precursor derived from an attenuated virus. In certain embodiments, the functional fragment is a fragment of arenavirus L protein precursor derived from an attenuated virus.

[0099] In certain embodiments, the functional fragment is a fragment of arenavirus glycoprotein precursor. In certain embodiments, the functional fragment is arenavirus GP signal peptide. In certain embodiments, the arenavirus GP signal peptide as described herein comprises an amino acid sequence that is at least 80%, 85%, 90%, 95%, 96%, 97%, 98%, 99% or 100% identical to the amino acid sequence of SEQ ID NO:25, SEQ ID NO:26, SEQ ID NO:27, SEQ ID NO:28, SEQ ID NO:29, SEQ ID NO:30, SEQ ID NO:53, SEQ ID NO:60, SEQ ID NO:67, SEQ ID NO:74, SEQ ID NO:85, SEQ ID NO:92, SEQ ID NO:99, SEQ ID NO:114, SEQ ID NO:121, SEQ ID NO:128, SEQ ID NO:135, SEQ ID NO:141, SEQ ID NO:142, SEQ ID NO:145, SEQ ID NO:146, SEQ ID NO:150, SEQ ID NO:151, SEQ ID NO:155, SEQ ID NO:156, SEQ ID NO:157, SEQ ID NO:162, or SEQ ID NO: 163. In certain embodiments, the arenavirus GP signal peptide as described herein comprises an amino acid sequence that is at least 80% identical to the amino acid sequence of SEQ ID NO:25, SEQ ID NO:26, SEQ ID NO:27, SEQ ID NO:28, SEQ ID NO:29, SEQ ID NO:30, SEQ ID NO:53, SEQ ID NO:60, SEQ ID NO:67, SEQ ID NO:74, SEQ ID NO:85, SEQ ID NO:92, SEQ ID NO:99, SEQ ID NO:114, SEQ ID NO:121, SEQ ID NO:128, SEQ ID NO:135, SEQ ID NO:141, SEQ ID NO:142, SEQ ID NO:145, SEQ ID NO:146, SEQ ID NO:150, SEQ ID NO:151, SEQ ID NO:155, SEQ ID NO:156, SEQ ID NO:157, SEQ ID NO:162, or SEQ ID NO: 163. In certain embodiments, the arenavirus GP signal peptide as described herein comprises an amino acid sequence that is at least 85% identical to the amino acid sequence of SEQ ID NO:25, SEQ ID NO:26, SEQ ID NO:27, SEQ ID NO:28, SEQ ID NO:29, SEQ ID NO:30, SEQ ID NO:53, SEQ ID NO:60, SEQ ID NO:67, SEQ ID NO:74, SEQ ID NO:85, SEQ ID NO:92, SEQ ID NO:99, SEQ ID NO:114, SEQ ID NO:121, SEQ ID NO:128, SEQ ID NO:135, SEQ ID NO:141, SEQ ID NO:142, SEQ ID NO:145, SEQ ID NO:146, SEQ ID NO:150, SEQ ID NO:151, SEQ ID NO:155, SEQ ID NO:156, SEQ ID NO:157, SEQ ID NO:162, or SEQ ID NO: 163. In certain embodiments, the arenavirus GP signal peptide as described herein comprises an amino acid sequence that is at least 90% identical to the amino acid sequence of SEQ ID NO:25, SEQ ID NO:26, SEQ ID NO:27, SEQ ID NO:28, SEQ ID NO:29, SEQ ID NO:30, SEQ ID NO:53, SEQ ID NO:60, SEQ ID NO:67, SEQ ID NO:74, SEQ ID NO:85, SEQ ID NO:92, SEQ ID NO:99, SEQ ID NO:114, SEQ ID NO:121, SEQ ID NO:128, SEQ ID NO:135, SEQ ID NO:141, SEQ ID NO:142, SEQ ID NO:145, SEQ ID NO:146, SEQ ID NO:150, SEQ ID NO:151, SEQ ID NO:155, SEQ ID NO:156, SEQ ID NO:157, SEQ ID NO:162, or SEQ ID NO: 163. In certain embodiments, the arenavirus GP signal peptide as described herein comprises an amino acid sequence that is at least 95% identical to the amino acid sequence of SEQ ID NO:25, SEQ ID NO:26, SEQ ID NO:27, SEQ ID NO:28, SEQ ID NO:29, SEQ ID NO:30, SEQ ID NO:53, SEQ ID NO:60, SEQ ID NO:67, SEQ ID NO:74, SEQ ID NO:85, SEQ ID NO:92, SEQ ID NO:99, SEQ ID NO:114, SEQ ID NO:121, SEQ ID NO:128, SEQ ID NO:135, SEQ ID NO:141, SEQ ID NO:142, SEQ ID NO:145, SEQ ID NO:146, SEQ ID NO:150, SEQ ID NO:151, SEQ ID NO:155, SEQ ID NO:156, SEQ ID NO:157, SEQ ID NO:162, or SEQ ID NO: 163. In certain embodiments, the arenavirus GP signal peptide as described herein comprises an amino acid sequence that is at least 96% identical to the amino acid sequence of SEQ ID NO:25, SEQ ID NO:26, SEQ ID NO:27, SEQ ID NO:28, SEQ ID NO:29, SEQ ID NO:30, SEQ ID NO:53, SEQ ID NO:60, SEQ ID NO:67, SEQ ID NO:74, SEQ ID NO:85, SEQ ID NO:92, SEQ ID NO:99, SEQ ID NO:114, SEQ ID NO:121, SEQ ID NO:128, SEQ ID NO:135, SEQ ID NO:141, SEQ ID NO:142, SEQ ID NO:145, SEQ ID NO:146, SEQ ID NO:150, SEQ ID NO:151, SEQ ID NO:155, SEQ ID NO:156, SEQ ID NO:157, SEQ ID NO:162, or SEQ ID NO: 163. In certain embodiments, the arenavirus GP signal peptide as described herein comprises an amino acid sequence that is at least 97% identical to the amino acid sequence of SEQ ID NO:25, SEQ ID NO:26, SEQ ID NO:27, SEQ ID NO:28, SEQ ID NO:29, SEQ ID NO:30, SEQ ID NO:53, SEQ ID NO:60, SEQ ID NO:67, SEQ ID NO:74, SEQ ID NO:85, SEQ ID NO:92, SEQ ID NO:99, SEQ ID NO:114, SEQ ID NO:121, SEQ ID NO:128, SEQ ID NO:135, SEQ ID NO:141, SEQ ID NO:142, SEQ ID NO:145, SEQ ID NO:146, SEQ ID NO:150, SEQ ID NO:151, SEQ ID NO:155, SEQ ID NO:156, SEQ ID NO:157, SEQ ID NO:162, or SEQ ID NO: 163. In certain embodiments, the arenavirus GP signal peptide as described herein comprises an amino acid sequence that is at least 98% identical to the amino acid sequence of SEQ ID NO:25, SEQ ID NO:26, SEQ ID NO:27, SEQ ID NO:28, SEQ ID NO:29, SEQ ID NO:30, SEQ ID NO:53, SEQ ID NO:60, SEQ ID NO:67, SEQ ID NO:74, SEQ ID NO:85, SEQ ID NO:92, SEQ ID NO:99, SEQ ID NO:114, SEQ ID NO:121, SEQ ID NO:128, SEQ ID NO:135, SEQ ID NO:141, SEQ ID NO:142, SEQ ID NO:145, SEQ ID NO:146, SEQ ID NO:150, SEQ ID NO:151, SEQ ID NO:155, SEQ ID NO:156, SEQ ID NO:157, SEQ ID NO:162, or SEQ ID NO: 163. In certain embodiments, the arenavirus GP signal peptide as described herein comprises an amino acid sequence that is at least 99% identical to the amino acid sequence of SEQ ID NO:25, SEQ ID NO:26, SEQ ID NO:27, SEQ ID NO:28, SEQ ID NO:29, SEQ ID NO:30, SEQ ID NO:53, SEQ ID NO:60, SEQ ID NO:67, SEQ ID NO:74, SEQ ID NO:85, SEQ ID NO:92, SEQ ID NO:99, SEQ ID NO:114, SEQ ID NO:121, SEQ ID NO:128, SEQ ID NO:135, SEQ ID NO:141, SEQ ID NO:142, SEQ ID NO:145, SEQ ID NO:146, SEQ ID NO:150, SEQ ID NO:151, SEQ ID NO:155, SEQ ID NO:156, SEQ ID NO:157, SEQ ID NO:162, or SEQ ID NO:163. In certain embodiments, the arenavirus GP signal peptide as described herein comprises an amino acid sequence that is 100% identical to the amino acid sequence of SEQ ID NO:25, SEQ ID NO:26, SEQ ID NO:27, SEQ ID NO:28, SEQ ID NO:29, SEQ ID NO:30, SEQ ID NO:53, SEQ ID NO:60, SEQ ID NO:67, SEQ ID NO:74, SEQ ID NO:85, SEQ ID NO:92, SEQ ID NO:99, SEQ ID NO:114, SEQ ID NO:121, SEQ ID NO:128, SEQ ID NO:135, SEQ ID NO:141, SEQ ID NO:142, SEQ ID NO:145, SEQ ID NO:146, SEQ ID NO:150, SEQ ID NO:151, SEQ ID NO:155, SEQ ID NO:156, SEQ ID NO:157, SEQ ID NO:162, or SEQ ID NO: 163. In certain embodiments, the arenavirus GP signal peptide as described herein comprises an amino acid sequence that is 80% identical to the amino acid sequence of SEQ ID NO:25, SEQ ID NO:26, SEQ ID NO:27, SEQ ID NO:28, SEQ ID NO:29, SEQ ID NO:30, SEQ ID NO:53, SEQ ID NO:60, SEQ ID NO:67, SEQ ID NO:74, SEQ ID NO:85, SEQ ID NO:92, SEQ ID NO:99, SEQ ID NO:114, SEQ ID NO:121, SEQ ID NO:128, SEQ ID NO:135, SEQ ID NO:141, SEQ ID NO:142, SEQ ID NO:145, SEQ ID NO:146, SEQ ID NO:150, SEQ ID NO:151, SEQ ID NO:155, SEQ ID NO:156, SEQ ID NO:157, SEQ ID NO:162, or SEQ ID NO: 163. In certain embodiments, the arenavirus GP signal peptide as described herein comprises an amino acid sequence that is 85% identical to the amino acid sequence of SEQ ID NO:25, SEQ ID NO:26, SEQ ID NO:27, SEQ ID NO:28, SEQ ID NO:29, SEQ ID NO:30, SEQ ID NO:53, SEQ ID NO:60, SEQ ID NO:67, SEQ ID NO:74, SEQ ID NO:85, SEQ ID NO:92, SEQ ID NO:99, SEQ ID NO: 114, SEQ ID NO:121, SEQ ID NO:128, SEQ ID NO:135, SEQ ID NO:141, SEQ ID NO:142, SEQ ID NO:145, SEQ ID NO:146, SEQ ID NO:150, SEQ ID NO:151, SEQ ID NO:155, SEQ ID NO:156, SEQ ID NO:157, SEQ ID NO:162, or SEQ ID NO: 163. In certain embodiments, the arenavirus GP signal peptide as described herein comprises an amino acid sequence that is 90% identical to the amino acid sequence of SEQ ID NO:25, SEQ ID NO:26, SEQ ID NO:27, SEQ ID NO:28, SEQ ID NO:29, SEQ ID NO:30, SEQ ID NO:53, SEQ ID NO:60, SEQ ID NO:67, SEQ ID NO:74, SEQ ID NO:85, SEQ ID NO:92, SEQ ID NO:99, SEQ ID NO:114, SEQ ID NO:121, SEQ ID NO:128, SEQ ID NO:135, SEQ ID NO:141, SEQ ID NO:142, SEQ ID NO:145, SEQ ID NO:146, SEQ ID NO:150, SEQ ID NO:151, SEQ ID NO:155, SEQ ID NO:156, SEQ ID NO:157, SEQ ID NO:162, or SEQ ID NO: 163. In certain embodiments, the arenavirus GP signal peptide as described herein comprises an amino acid sequence that is 95% identical to the amino acid sequence of SEQ ID NO:25, SEQ ID NO:26, SEQ ID NO:27, SEQ ID NO:28, SEQ ID NO:29, SEQ ID NO:30, SEQ ID NO:53, SEQ ID NO:60, SEQ ID NO:67, SEQ ID NO:74, SEQ ID NO:85, SEQ ID NO:92, SEQ ID NO:99, SEQ ID NO: 114, SEQ ID NO:121, SEQ ID NO:128, SEQ ID NO:135, SEQ ID NO:141, SEQ ID NO:142, SEQ ID NO:145, SEQ ID NO:146, SEQ ID NO:150, SEQ ID NO:151, SEQ ID NO:155, SEQ ID NO:156, SEQ ID NO:157, SEQ ID NO:162, or SEQ ID NO: 163. In certain embodiments, the arenavirus GP signal peptide as described herein comprises an amino acid sequence that is 96% identical to the amino acid sequence of SEQ ID NO:25, SEQ ID NO:26, SEQ ID NO:27, SEQ ID NO:28, SEQ ID NO:29, SEQ ID NO:30, SEQ ID NO:53, SEQ ID NO:60, SEQ ID NO:67, SEQ ID NO:74, SEQ ID NO:85, SEQ ID NO:92, SEQ ID NO:99, SEQ ID NO:114, SEQ ID NO:121, SEQ ID NO:128, SEQ ID NO:135, SEQ ID NO:141, SEQ ID NO:142, SEQ ID NO:145, SEQ ID NO:146, SEQ ID NO:150, SEQ ID NO:151, SEQ ID NO:155, SEQ ID NO:156, SEQ ID NO:157, SEQ ID NO:162, or SEQ ID NO: 163. In certain embodiments, the arenavirus GP signal peptide as described herein comprises an amino acid sequence that is 97% identical to the amino acid sequence of SEQ ID NO:25, SEQ ID NO:26, SEQ ID NO:27, SEQ ID NO:28, SEQ ID NO:29, SEQ ID NO:30, SEQ ID NO:53, SEQ ID NO:60, SEQ ID NO:67, SEQ ID NO:74, SEQ ID NO:85, SEQ ID NO:92, SEQ ID NO:99, SEQ ID NO:114, SEQ ID NO:121, SEQ ID NO:128, SEQ ID NO:135, SEQ ID NO:141, SEQ ID NO:142, SEQ ID NO:145, SEQ ID NO:146, SEQ ID NO:150, SEQ ID NO:151, SEQ ID NO:155, SEQ ID NO:156, SEQ ID NO:157, SEQ ID NO:162, or SEQ ID NO: 163. In certain embodiments, the arenavirus GP signal peptide as described herein comprises an amino acid sequence that is 98% identical to the amino acid sequence of SEQ ID NO:25, SEQ ID NO:26, SEQ ID NO:27, SEQ ID NO:28, SEQ ID NO:29, SEQ ID NO:30, SEQ ID NO:53, SEQ ID NO:60, SEQ ID NO:67, SEQ ID NO:74, SEQ ID NO:85, SEQ ID NO:92, SEQ ID NO:99, SEQ ID NO: 114, SEQ ID NO:121, SEQ ID NO:128, SEQ ID NO:135, SEQ ID NO:141, SEQ ID NO:142, SEQ ID NO:145, SEQ ID NO:146, SEQ ID NO:150, SEQ ID NO:151, SEQ ID NO:155, SEQ ID NO:156, SEQ ID NO:157, SEQ ID NO:162, or SEQ ID NO: 163. In certain embodiments, the arenavirus GP signal peptide as described herein comprises an amino acid sequence that is 99% identical to the amino acid sequence of SEQ ID NO:25, SEQ ID NO:26, SEQ ID NO:27, SEQ ID NO:28, SEQ ID NO:29, SEQ ID NO:30, SEQ ID NO:53, SEQ ID NO:60, SEQ ID NO:67, SEQ ID NO:74, SEQ ID NO:85, SEQ ID NO:92, SEQ ID NO:99, SEQ ID NO:114, SEQ ID NO:121, SEQ ID NO:128, SEQ ID NO:135, SEQ ID NO:141, SEQ ID NO:142, SEQ ID NO:145, SEQ ID NO:146, SEQ ID NO:150, SEQ ID NO:151, SEQ ID NO:155, SEQ ID NO:156, SEQ ID NO:157, SEQ ID NO:162, or SEQ ID NO: 163.

[0100] In certain embodiments, the functional fragment is GP1. In certain embodiments, the GP1 as described herein comprises an amino acid sequence that is at least 80%, 85%, 90%, 95%, 96%, 97%, 98%, 99% or 100% identical to the amino acid sequence of SEQ ID NO:31, SEQ ID NO:32, SEQ ID NO:33, SEQ ID NO:142, SEQ ID NO:34, SEQ ID NO:35, SEQ ID NO:36, SEQ ID NO:54, SEQ ID NO:61, SEQ ID NO:68, SEQ ID NO:75, SEQ ID NO:86, SEQ ID NO:93, SEQ ID NO:100, SEQ ID NO:115, SEQ ID NO:122, SEQ ID NO:129, SEQ ID NO:136, SEQ ID NO:143, SEQ ID NO:144, SEQ ID NO: 147, SEQ ID NO:148, SEQ ID NO:152, SEQ ID NO:153, SEQ ID NO:158, SEQ ID NO:159, SEQ ID NO:160, SEQ ID NO:164, or SEQ ID NO:165. In certain embodiments, the arenavirus GP1 as described herein comprises an amino acid sequence that is at least 80% identical to the amino acid sequence of SEQ ID NO:31, SEQ ID NO:32, SEQ ID NO:33, SEQ ID NO:142, SEQ ID NO:34, SEQ ID NO:35, SEQ ID NO:36, SEQ ID NO:54, SEQ ID NO:61, SEQ ID NO:68, SEQ ID NO:75, SEQ ID NO:86, SEQ ID NO:93, SEQ ID NO:100, SEQ ID NO:115, SEQ ID NO:122, SEQ ID NO:129, SEQ ID NO:136, SEQ ID NO:143, SEQ ID NO:144, SEQ ID NO: 147, SEQ ID NO:148, SEQ ID NO:152, SEQ ID NO:153, SEQ ID NO:158, SEQ ID NO:159, SEQ ID NO:160, SEQ ID NO:164, or SEQ ID NO:165. In certain embodiments, the arenavirus GP1 as described herein comprises an amino acid sequence that is at least 85% identical to the amino acid sequence of SEQ ID NO:31, SEQ ID NO:32, SEQ ID NO:33, SEQ ID NO:142, SEQ ID NO:34, SEQ ID NO:35, SEQ ID NO:36, SEQ ID NO:54, SEQ ID NO:61, SEQ ID NO:68, SEQ ID NO:75, SEQ ID NO:86, SEQ ID NO:93, SEQ ID NO:100, SEQ ID NO: 115, SEQ ID NO:122, SEQ ID NO:129, SEQ ID NO:136, SEQ ID NO:143, SEQ ID NO:144, SEQ ID NO: 147, SEQ ID NO:148, SEQ ID NO:152, SEQ ID NO:153, SEQ ID NO:158, SEQ ID NO:159, SEQ ID NO:160, SEQ ID NO:164, or SEQ ID NO:165. In certain embodiments, the arenavirus GP1 as described herein comprises an amino acid sequence that is at least 90% identical to the amino acid sequence of SEQ ID NO:31, SEQ ID NO:32, SEQ ID NO:33, SEQ ID NO:142, SEQ ID NO:34, SEQ ID NO:35, SEQ ID NO:36, SEQ ID NO:54, SEQ ID NO:61, SEQ ID NO:68, SEQ ID NO:75, SEQ ID NO:86, SEQ ID NO:93, SEQ ID NO:100, SEQ ID NO:115, SEQ ID NO:122, SEQ ID NO:129, SEQ ID NO:136, SEQ ID NO:143, SEQ ID NO:144, SEQ ID NO: 147, SEQ ID NO:148, SEQ ID NO:152, SEQ ID NO:153, SEQ ID NO:158, SEQ ID NO:159, SEQ ID NO:160, SEQ ID NO:164, or SEQ ID NO:165. In certain embodiments, the arenavirus GP1 as described herein comprises an amino acid sequence that is at least 95% identical to the amino acid sequence of SEQ ID NO:31, SEQ ID NO:32, SEQ ID NO:33, SEQ ID NO:142, SEQ ID NO:34, SEQ ID NO:35, SEQ ID NO:36, SEQ ID NO:54, SEQ ID NO:61, SEQ ID NO:68, SEQ ID NO:75, SEQ ID NO:86, SEQ ID NO:93, SEQ ID NO:100, SEQ ID NO:115, SEQ ID NO:122, SEQ ID NO:129, SEQ ID NO:136, SEQ ID NO:143, SEQ ID NO:144, SEQ ID NO: 147, SEQ ID NO:148, SEQ ID NO:152, SEQ ID NO:153, SEQ ID NO:158, SEQ ID NO:159, SEQ ID NO:160, SEQ ID NO:164, or SEQ ID NO:165. In certain embodiments, the arenavirus GP1 as described herein comprises an amino acid sequence that is at least 96% identical to the amino acid sequence of SEQ ID NO:31, SEQ ID NO:32, SEQ ID NO:33, SEQ ID NO:142, SEQ ID NO:34, SEQ ID NO:35, SEQ ID NO:36, SEQ ID NO:54, SEQ ID NO:61, SEQ ID NO:68, SEQ ID NO:75, SEQ ID NO:86, SEQ ID NO:93, SEQ ID NO:100, SEQ ID NO: 115, SEQ ID NO:122, SEQ ID NO:129, SEQ ID NO:136, SEQ ID NO:143, SEQ ID NO:144, SEQ ID NO: 147, SEQ ID NO:148, SEQ ID NO:152, SEQ ID NO:153, SEQ ID NO:158, SEQ ID NO:159, SEQ ID NO:160, SEQ ID NO:164, or SEQ ID NO:165. In certain embodiments, the arenavirus GP1 as described herein comprises an amino acid sequence that is at least 97% identical to the amino acid sequence of SEQ ID NO:31, SEQ ID NO:32, SEQ ID NO:33, SEQ ID NO:142, SEQ ID NO:34, SEQ ID NO:35, SEQ ID NO:36, SEQ ID NO:54, SEQ ID NO:61, SEQ ID NO:68, SEQ ID NO:75, SEQ ID NO:86, SEQ ID NO:93, SEQ ID NO:100, SEQ ID NO:115, SEQ ID NO:122, SEQ ID NO:129, SEQ ID NO:136, SEQ ID NO:143, SEQ ID NO:144, SEQ ID NO: 147, SEQ ID NO:148, SEQ ID NO:152, SEQ ID NO:153, SEQ ID NO:158, SEQ ID NO:159, SEQ ID NO:160, SEQ ID NO:164, or SEQ ID NO:165. In certain embodiments, the arenavirus GP1 as described herein comprises an amino acid sequence that is at least 98% identical to the amino acid sequence of SEQ ID NO:31, SEQ ID NO:32, SEQ ID NO:33, SEQ ID NO:142, SEQ ID NO:34, SEQ ID NO:35, SEQ ID NO:36, SEQ ID NO:54, SEQ ID NO:61, SEQ ID NO:68, SEQ ID NO:75, SEQ ID NO:86, SEQ ID NO:93, SEQ ID NO:100, SEQ ID NO:115, SEQ ID NO:122, SEQ ID NO:129, SEQ ID NO:136, SEQ ID NO:143, SEQ ID NO:144, SEQ ID NO: 147, SEQ ID NO:148, SEQ ID NO:152, SEQ ID NO:153, SEQ ID NO:158, SEQ ID NO:159, SEQ ID NO:160, SEQ ID NO:164, or SEQ ID NO:165. In certain embodiments, the arenavirus GP1 as described herein comprises an amino acid sequence that is at least 99% identical to the amino acid sequence of SEQ ID NO:31, SEQ ID NO:32, SEQ ID NO:33, SEQ ID NO:142, SEQ ID NO:34, SEQ ID NO:35, SEQ ID NO:36, SEQ ID NO:54, SEQ ID NO:61, SEQ ID NO:68, SEQ ID NO:75, SEQ ID NO:86, SEQ ID NO:93, SEQ ID NO:100, SEQ ID NO: 115, SEQ ID NO:122, SEQ ID NO:129, SEQ ID NO:136, SEQ ID NO:143, SEQ ID NO:144, SEQ ID NO: 147, SEQ ID NO:148, SEQ ID NO:152, SEQ ID NO:153, SEQ ID NO:158, SEQ ID NO:159, SEQ ID NO:160, SEQ ID NO:164, or SEQ ID NO:165. In certain embodiments, the arenavirus GP1 as described herein comprises an amino acid sequence that is 100% identical to the amino acid sequence of SEQ ID NO:31, SEQ ID NO:32, SEQ ID NO:33, SEQ ID NO:142, SEQ ID NO:34, SEQ ID NO:35, SEQ ID NO:36, SEQ ID NO:54, SEQ ID NO:61, SEQ ID NO:68, SEQ ID NO:75, SEQ ID NO:86, SEQ ID NO:93, SEQ ID NO:100, SEQ ID NO: 115, SEQ ID NO:122, SEQ ID NO:129, SEQ ID NO:136, SEQ ID NO:143, SEQ ID NO:144, SEQ ID NO: 147, SEQ ID NO:148, SEQ ID NO:152, SEQ ID NO:153, SEQ ID NO:158, SEQ ID NO:159, SEQ ID NO:160, SEQ ID NO:164, or SEQ ID NO:165. In certain embodiments, the arenavirus GP1 as described herein comprises an amino acid sequence that is 80% identical to the amino acid sequence of SEQ ID NO:31, SEQ ID NO:32, SEQ ID NO:33, SEQ ID NO:142, SEQ ID NO:34, SEQ ID NO:35, SEQ ID NO:36, SEQ ID NO:54, SEQ ID NO:61, SEQ ID NO:68, SEQ ID NO:75, SEQ ID NO:86, SEQ ID NO:93, SEQ ID NO: 100, SEQ ID NO: 115, SEQ ID NO:122, SEQ ID NO:129, SEQ ID NO:136, SEQ ID NO:143, SEQ ID NO:144, SEQ ID NO: 147, SEQ ID NO:148, SEQ ID NO:152, SEQ ID NO:153, SEQ ID NO:158, SEQ ID NO:159, SEQ ID NO:160, SEQ ID NO:164, or SEQ ID NO:165. In certain embodiments, the arenavirus GP1 as described herein comprises an amino acid sequence that is 85% identical to the amino acid sequence of SEQ ID NO:31, SEQ ID NO:32, SEQ ID NO:33, SEQ ID NO:142, SEQ ID NO:34, SEQ ID NO:35, SEQ ID NO:36, SEQ ID NO:54, SEQ ID NO:61, SEQ ID NO:68, SEQ ID NO:75, SEQ ID NO:86, SEQ ID NO:93, SEQ ID NO:100, SEQ ID NO:115, SEQ ID NO:122, SEQ ID NO:129, SEQ ID NO:136, SEQ ID NO:143, SEQ ID NO:144, SEQ ID NO: 147, SEQ ID NO:148, SEQ ID NO:152, SEQ ID NO:153, SEQ ID NO:158, SEQ ID NO:159, SEQ ID NO:160, SEQ ID NO:164, or SEQ ID NO:165. In certain embodiments, the arenavirus GP1 as described herein comprises an amino acid sequence that is 90% identical to the amino acid sequence of SEQ ID NO:31, SEQ ID NO:32, SEQ ID NO:33, SEQ ID NO:142, SEQ ID NO:34, SEQ ID NO:35, SEQ ID NO:36, SEQ ID NO:54, SEQ ID NO:61, SEQ ID NO:68, SEQ ID NO:75, SEQ ID NO:86, SEQ ID NO:93, SEQ ID NO:100, SEQ ID NO: 115, SEQ ID NO:122, SEQ ID NO:129, SEQ ID NO:136, SEQ ID NO:143, SEQ ID NO:144, SEQ ID NO: 147, SEQ ID NO:148, SEQ ID NO:152, SEQ ID NO:153, SEQ ID NO:158, SEQ ID NO:159, SEQ ID NO:160, SEQ ID NO:164, or SEQ ID NO:165. In certain embodiments, the arenavirus GP1 as described herein comprises an amino acid sequence that is 95% identical to the amino acid sequence of SEQ ID NO:31, SEQ ID NO:32, SEQ ID NO:33, SEQ ID NO:142, SEQ ID NO:34, SEQ ID NO:35, SEQ ID NO:36, SEQ ID NO:54, SEQ ID NO:61, SEQ ID NO:68, SEQ ID NO:75, SEQ ID NO:86, SEQ ID NO:93, SEQ ID NO:100, SEQ ID NO: 115, SEQ ID NO:122, SEQ ID NO:129, SEQ ID NO:136, SEQ ID NO:143, SEQ ID NO:144, SEQ ID NO: 147, SEQ ID NO:148, SEQ ID NO:152, SEQ ID NO:153, SEQ ID NO:158, SEQ ID NO:159, SEQ ID NO:160, SEQ ID NO:164, or SEQ ID NO:165. In certain embodiments, the arenavirus GP1 as described herein comprises an amino acid sequence that is 96% identical to the amino acid sequence of SEQ ID NO:31, SEQ ID NO:32, SEQ ID NO:33, SEQ ID NO:142, SEQ ID NO:34, SEQ ID NO:35, SEQ ID NO:36, SEQ ID NO:54, SEQ ID NO:61, SEQ ID NO:68, SEQ ID NO:75, SEQ ID NO:86, SEQ ID NO:93, SEQ ID NO:100, SEQ ID NO: 115, SEQ ID NO:122, SEQ ID NO:129, SEQ ID NO:136, SEQ ID NO:143, SEQ ID NO:144, SEQ ID NO: 147, SEQ ID NO:148, SEQ ID NO:152, SEQ ID NO:153, SEQ ID NO:158, SEQ ID NO:159, SEQ ID NO:160, SEQ ID NO:164, or SEQ ID NO: 165. In certain embodiments, the arenavirus GP1 as described herein comprises an amino acid sequence that is 97% identical to the amino acid sequence of SEQ ID NO:31, SEQ ID NO:32, SEQ ID NO:33, SEQ ID NO:142, SEQ ID NO:34, SEQ ID NO:35, SEQ ID NO:36, SEQ ID NO:54, SEQ ID NO:61, SEQ ID NO:68, SEQ ID NO:75, SEQ ID NO:86, SEQ ID NO:93, SEQ ID NO: 100, SEQ ID NO: 115, SEQ ID NO:122, SEQ ID NO:129, SEQ ID NO:136, SEQ ID NO:143, SEQ ID NO:144, SEQ ID NO: 147, SEQ ID NO:148, SEQ ID NO:152, SEQ ID NO:153, SEQ ID NO:158, SEQ ID NO:159, SEQ ID NO:160, SEQ ID NO:164, or SEQ ID NO:165. In certain embodiments, the arenavirus GP1 as described herein comprises an amino acid sequence that is 98% identical to the amino acid sequence of SEQ ID NO:31, SEQ ID NO:32, SEQ ID NO:33, SEQ ID NO:142, SEQ ID NO:34, SEQ ID NO:35, SEQ ID NO:36, SEQ ID NO:54, SEQ ID NO:61, SEQ ID NO:68, SEQ ID NO:75, SEQ ID NO:86, SEQ ID NO:93, SEQ ID NO:100, SEQ ID NO:115, SEQ ID NO:122, SEQ ID NO:129, SEQ ID NO:136, SEQ ID NO:143, SEQ ID NO:144, SEQ ID NO: 147, SEQ ID NO:148, SEQ ID NO:152, SEQ ID NO:153, SEQ ID NO:158, SEQ ID NO:159, SEQ ID NO:160, SEQ ID NO:164, or SEQ ID NO:165. In certain embodiments, the arenavirus GP1 as described herein comprises an amino acid sequence that is 99% identical to the amino acid sequence of SEQ ID NO:31, SEQ ID NO:32, SEQ ID NO:33, SEQ ID NO:142, SEQ ID NO:34, SEQ ID NO:35, SEQ ID NO:36, SEQ ID NO:54, SEQ ID NO:61, SEQ ID NO:68, SEQ ID NO:75, SEQ ID NO:86, SEQ ID NO:93, SEQ ID NO:100, SEQ ID NO: 115, SEQ ID NO:122, SEQ ID NO:129, SEQ ID NO:136, SEQ ID NO:143, SEQ ID NO:144, SEQ ID NO: 147, SEQ ID NO:148, SEQ ID NO:152, SEQ ID NO:153, SEQ ID NO:158, SEQ ID NO:159, SEQ ID NO:160, SEQ ID NO:164, or SEQ ID NO:165.

[0101] In certain embodiments, the functional fragment is GP2. In certain embodiments, the GP2 as described herein comprises an amino acid sequence that is at least 80%, 85%, 90%, 95%, 96%, 97%, 98%, 99% or 100% identical to the amino acid sequence of SEQ ID NO:37, SEQ ID NO:38, SEQ ID NO:39, SEQ ID NO:40, SEQ ID NO:41, SEQ ID NO:42, SEQ ID NO:55, SEQ ID NO:62, SEQ ID NO:69, SEQ ID NO:76, SEQ ID NO:87, SEQ ID NO:94, SEQ ID NO:101, SEQ ID NO: 116, SEQ ID NO:123, SEQ ID NO:130, SEQ ID NO:137, SEQ ID NO:149, SEQ ID NO:154, SEQ ID NO:161, or SEQ ID NO:166. In certain embodiments, the arenavirus GP2 as described herein comprises an amino acid sequence that is at least 80% identical to the amino acid sequence of SEQ ID NO:37, SEQ ID NO:38, SEQ ID NO:39, SEQ ID NO:40, SEQ ID NO:41, SEQ ID NO:42, SEQ ID NO:55, SEQ ID NO:62, SEQ ID NO:69, SEQ ID NO:76, SEQ ID NO:87, SEQ ID NO:94, SEQ ID NO:101, SEQ ID NO: 116, SEQ ID NO:123, SEQ ID NO:130, SEQ ID NO:137, SEQ ID NO:149, SEQ ID NO:154, SEQ ID NO:161, or SEQ ID NO:166. In certain embodiments, the arenavirus GP2 as described herein comprises an amino acid sequence that is at least 85% identical to the amino acid sequence of SEQ ID NO:37, SEQ ID NO:38, SEQ ID NO:39, SEQ ID NO:40, SEQ ID NO:41, SEQ ID NO:42, SEQ ID NO:55, SEQ ID NO:62, SEQ ID NO:69, SEQ ID NO:76, SEQ ID NO:87, SEQ ID NO:94, SEQ ID NO:101, SEQ ID NO:116, SEQ ID NO:123, SEQ ID NO:130, SEQ ID NO:137, SEQ ID NO:149, SEQ ID NO:154, SEQ ID NO:161, or SEQ ID NO:166. In certain embodiments, the arenavirus GP2 as described herein comprises an amino acid sequence that is at least 90% identical to the amino acid sequence of SEQ ID NO:37, SEQ ID NO:38, SEQ ID NO:39, SEQ ID NO:40, SEQ ID NO:41, SEQ ID NO:42, SEQ ID NO:55, SEQ ID NO:62, SEQ ID NO:69, SEQ ID NO:76, SEQ ID NO:87, SEQ ID NO:94, SEQ ID NO:101, SEQ ID NO:116, SEQ ID NO:123, SEQ ID NO:130, SEQ ID NO:137, SEQ ID NO:149, SEQ ID NO:154, SEQ ID NO:161, or SEQ ID NO: 166. In certain embodiments, the arenavirus GP2 as described herein comprises an amino acid sequence that is at least 95% identical to the amino acid sequence of SEQ ID NO:37, SEQ ID NO:38, SEQ ID NO:39, SEQ ID NO:40, SEQ ID NO:41, SEQ ID NO:42, SEQ ID NO:55, SEQ ID NO:62, SEQ ID NO:69, SEQ ID NO:76, SEQ ID NO:87, SEQ ID NO:94, SEQ ID NO:101, SEQ ID NO: 116, SEQ ID NO:123, SEQ ID NO:130, SEQ ID NO:137, SEQ ID NO:149, SEQ ID NO:154, SEQ ID NO:161, or SEQ ID NO:166. In certain embodiments, the arenavirus GP2 as described herein comprises an amino acid sequence that is at least 96% identical to the amino acid sequence of SEQ ID NO:37, SEQ ID NO:38, SEQ ID NO:39, SEQ ID NO:40, SEQ ID NO:41, SEQ ID NO:42, SEQ ID NO:55, SEQ ID NO:62, SEQ ID NO:69, SEQ ID NO:76, SEQ ID NO:87, SEQ ID NO:94, SEQ ID NO:101, SEQ ID NO: 116, SEQ ID NO:123, SEQ ID NO:130, SEQ ID NO:137, SEQ ID NO:149, SEQ ID NO:154, SEQ ID NO:161, or SEQ ID NO:166. In certain embodiments, the arenavirus GP2 as described herein comprises an amino acid sequence that is at least 97% identical to the amino acid sequence of SEQ ID NO:37, SEQ ID NO:38, SEQ ID NO:39, SEQ ID NO:40, SEQ ID NO:41, SEQ ID NO:42, SEQ ID NO:55, SEQ ID NO:62, SEQ ID NO:69, SEQ ID NO:76, SEQ ID NO:87, SEQ ID NO:94, SEQ ID NO:101, SEQ ID NO:116, SEQ ID NO:123, SEQ ID NO:130, SEQ ID NO:137, SEQ ID NO:149, SEQ ID NO:154, SEQ ID NO:161, or SEQ ID NO:166. In certain embodiments, the arenavirus GP2 as described herein comprises an amino acid sequence that is at least 98% identical to the amino acid sequence of SEQ ID NO:37, SEQ ID NO:38, SEQ ID NO:39, SEQ ID NO:40, SEQ ID NO:41, SEQ ID NO:42, SEQ ID NO:55, SEQ ID NO:62, SEQ ID NO:69, SEQ ID NO:76, SEQ ID NO:87, SEQ ID NO:94, SEQ ID NO:101, SEQ ID NO:116, SEQ ID NO:123, SEQ ID NO:130, SEQ ID NO:137, SEQ ID NO:149, SEQ ID NO:154, SEQ ID NO:161, or SEQ ID NO:166. In certain embodiments, the arenavirus GP2 as described herein comprises an amino acid sequence that is at least 99% identical to the amino acid sequence of SEQ ID NO:37, SEQ ID NO:38, SEQ ID NO:39, SEQ ID NO:40, SEQ ID NO:41, SEQ ID NO:42, SEQ ID NO:55, SEQ ID NO:62, SEQ ID NO:69, SEQ ID NO:76, SEQ ID NO:87, SEQ ID NO:94, SEQ ID NO:101, SEQ ID NO: 116, SEQ ID NO:123, SEQ ID NO:130, SEQ ID NO:137, SEQ ID NO:149, SEQ ID NO:154, SEQ ID NO:161, or SEQ ID NO:166. In certain embodiments, the arenavirus GP2 as described herein comprises an amino acid sequence that is 100% identical to the amino acid sequence of SEQ ID NO:37, SEQ ID NO:38, SEQ ID NO:39, SEQ ID NO:40, SEQ ID NO:41, SEQ ID NO:42, SEQ ID NO:55, SEQ ID NO:62, SEQ ID NO:69, SEQ ID NO:76, SEQ ID NO:87, SEQ ID NO:94, SEQ ID NO:101, SEQ ID NO: 116, SEQ ID NO:123, SEQ ID NO:130, SEQ ID NO:137, SEQ ID NO:149, SEQ ID NO:154, SEQ ID NO:161, or SEQ ID NO:166. In certain embodiments, the arenavirus GP2 as described herein comprises an amino acid sequence that is 80% identical to the amino acid sequence of SEQ ID NO:37, SEQ ID NO:38, SEQ ID NO:39, SEQ ID NO:40, SEQ ID NO:41, SEQ ID NO:42, SEQ ID NO:55, SEQ ID NO:62, SEQ ID NO:69, SEQ ID NO:76, SEQ ID NO:87, SEQ ID NO:94, SEQ ID NO:101, SEQ ID NO:116, SEQ ID NO:123, SEQ ID NO:130, SEQ ID NO:137, SEQ ID NO:149, SEQ ID NO:154, SEQ ID NO:161, or SEQ ID NO:166. In certain embodiments, the arenavirus GP2 as described herein comprises an amino acid sequence that is 85% identical to the amino acid sequence of SEQ ID NO:37, SEQ ID NO:38, SEQ ID NO:39, SEQ ID NO:40, SEQ ID NO:41, SEQ ID NO:42, SEQ ID NO:55, SEQ ID NO:62, SEQ ID NO:69, SEQ ID NO:76, SEQ ID NO:87, SEQ ID NO:94, SEQ ID NO:101, SEQ ID NO:116, SEQ ID NO:123, SEQ ID NO:130, SEQ ID NO:137, SEQ ID NO:149, SEQ ID NO:154, SEQ ID NO:161, or SEQ ID NO:166. In certain embodiments, the arenavirus GP2 as described herein comprises an amino acid sequence that is 90% identical to the amino acid sequence of SEQ ID NO:37, SEQ ID NO:38, SEQ ID NO:39, SEQ ID NO:40, SEQ ID NO:41, SEQ ID NO:42, SEQ ID NO:55, SEQ ID NO:62, SEQ ID NO:69, SEQ ID NO:76, SEQ ID NO:87, SEQ ID NO:94, SEQ ID NO:101, SEQ ID NO: 116, SEQ ID NO:123, SEQ ID NO:130, SEQ ID NO:137, SEQ ID NO:149, SEQ ID NO:154, SEQ ID NO:161, or SEQ ID NO:166. In certain embodiments, the arenavirus GP2 as described herein comprises an amino acid sequence that is 95% identical to the amino acid sequence of SEQ ID NO:37, SEQ ID NO:38, SEQ ID NO:39, SEQ ID NO:40, SEQ ID NO:41, SEQ ID NO:42, SEQ ID NO:55, SEQ ID NO:62, SEQ ID NO:69, SEQ ID NO:76, SEQ ID NO:87, SEQ ID NO:94, SEQ ID NO:101, SEQ ID NO:116, SEQ ID NO:123, SEQ ID NO:130, SEQ ID NO:137, SEQ ID NO:149, SEQ ID NO:154, SEQ ID NO:161, or SEQ ID NO:166. In certain embodiments, the arenavirus GP2 as described herein comprises an amino acid sequence that is 96% identical to the amino acid sequence of SEQ ID NO:37, SEQ ID NO:38, SEQ ID NO:39, SEQ ID NO:40, SEQ ID NO:41, SEQ ID NO:42, SEQ ID NO:55, SEQ ID NO:62, SEQ ID NO:69, SEQ ID NO:76, SEQ ID NO:87, SEQ ID NO:94, SEQ ID NO:101, SEQ ID NO:116, SEQ ID NO:123, SEQ ID NO:130, SEQ ID NO:137, SEQ ID NO:149, SEQ ID NO:154, SEQ ID NO:161, or SEQ ID NO:166. In certain embodiments, the arenavirus GP2 as described herein comprises an amino acid sequence that is 97% identical to the amino acid sequence of SEQ ID NO:37, SEQ ID NO:38, SEQ ID NO:39, SEQ ID NO:40, SEQ ID NO:41, SEQ ID NO:42, SEQ ID NO:55, SEQ ID NO:62, SEQ ID NO:69, SEQ ID NO:76, SEQ ID NO:87, SEQ ID NO:94, SEQ ID NO:101, SEQ ID NO: 116, SEQ ID NO:123, SEQ ID NO:130, SEQ ID NO:137, SEQ ID NO:149, SEQ ID NO:154, SEQ ID NO:161, or SEQ ID NO:166. In certain embodiments, the arenavirus GP2 as described herein comprises an amino acid sequence that is 98% identical to the amino acid sequence of SEQ ID NO:37, SEQ ID NO:38, SEQ ID NO:39, SEQ ID NO:40, SEQ ID NO:41, SEQ ID NO:42, SEQ ID NO:55, SEQ ID NO:62, SEQ ID NO:69, SEQ ID NO:76, SEQ ID NO:87, SEQ ID NO:94, SEQ ID NO:101, SEQ ID NO:116, SEQ ID NO:123, SEQ ID NO:130, SEQ ID NO:137, SEQ ID NO:149, SEQ ID NO:154, SEQ ID NO:161, or SEQ ID NO:166. In certain embodiments, the arenavirus GP2 as described herein comprises an amino acid sequence that is 99% identical to the amino acid sequence of SEQ ID NO:37, SEQ ID NO:38, SEQ ID NO:39, SEQ ID NO:40, SEQ ID NO:41, SEQ ID NO:42, SEQ ID NO:55, SEQ ID NO:62, SEQ ID NO:69, SEQ ID NO:76, SEQ ID NO:87, SEQ ID NO:94, SEQ ID NO:101, SEQ ID NO:116, SEQ ID NO:123, SEQ ID NO:130, SEQ ID NO:137, SEQ ID NO:149, SEQ ID NO:154, SEQ ID NO:161, or SEQ ID NO:166.

[0102] In certain embodiments, the functional fragment may consist of more than one of a GP signal peptide and a buffer peptide, GP1 and GP2. In some embodiments, an arenavirus GP1 and/or arenavirus GP2 comprises an amino acid sequence starting at about amino acid 59 to about 508 of SEQ ID NO:3, or a biologically active fragment thereof. In some embodiments, an arenavirus GP1 and/or arenavirus GP2 comprises an amino acid sequence starting at about amino acid 60 (or after 60) to about 508 of SEQ ID NO:3, or a biologically active fragment thereof. In some embodiments, an arenavirus GP1 and/or arenavirus GP2 comprises an amino acid sequence starting at about amino acid 58 to about 508 of SEQ ID NO:3, or a biologically active fragment thereof. In some embodiments, an arenavirus GP1 and/or arenavirus GP2 comprises an amino acid sequence starting at about amino acid 59 to about the end of any one of SEQ ID NO:1, SEQ ID NO:2, SEQ ID NO:3, SEQ ID NO:4, SEQ ID NO:5, SEQ ID NO:6, SEQ ID NO:48, SEQ ID NO:52, SEQ ID NO:59, SEQ ID NO:66, SEQ ID NO:73, SEQ ID NO:80, SEQ ID NO:84, SEQ ID NO:91, SEQ ID NO:98, SEQ ID NO:105, SEQ ID NO:109, SEQ ID NO:113, SEQ ID NO:120, SEQ ID NO:127, or SEQ ID NO:134, or a biologically active fragment thereof. In some embodiments, an arenavirus GP1 and/or arenavirus GP2 comprises an amino acid sequence starting at a position after amino acid 59 of any one of SEQ ID NO:1, SEQ ID NO:2, SEQ ID NO:3, SEQ ID NO:4, SEQ ID NO:5, SEQ ID NO:6, SEQ ID NO:48, SEQ ID NO:52, SEQ ID NO:59, SEQ ID NO:66, SEQ ID NO:73, SEQ ID NO:80, SEQ ID NO:84, SEQ ID NO:91, SEQ ID NO:98, SEQ ID NO:105, SEQ ID NO:109, SEQ ID NO:113, SEQ ID NO:120, SEQ ID NO:127, or SEQ ID NO:134. In some embodiments, an arenavirus GP1 and/or arenavirus GP2 comprises an amino acid sequence starting at a position before amino acid 59 of any one of SEQ ID NO:1, SEQ ID NO:2, SEQ ID NO:3, SEQ ID NO:4, SEQ ID NO:5, SEQ ID NO:6, SEQ ID NO:48, SEQ ID NO:52, SEQ ID NO:59, SEQ ID NO:66, SEQ ID NO:73, SEQ ID NO:80, SEQ ID NO:84, SEQ ID NO:91, SEQ ID NO:98, SEQ ID NO:105, SEQ ID NO:109, SEQ ID NO:113, SEQ ID NO:120, SEQ ID NO:127, or SEQ ID NO:134. In certain embodiments, the functional fragment may consist of GP signal peptide, a buffer peptide, and GP1. In certain embodiments, the functional fragment may consist of GP signal peptide, a buffer peptide, and GP2. In certain embodiments, the functional fragment may consist of GP1 and GP2. In certain embodiments, the functional fragment is not the full-length glycoprotein precursor.

[0103] In certain embodiments, the functional fragment is a fragment of an arenavirus GP signal peptide and a buffer peptide. In certain embodiments, the arenavirus GP signal peptide is wild-type. In other embodiments, the arenavirus GP signal peptide is recombinant. In certain embodiments, the arenavirus GP signal peptide is selected from the group consisting of GP signal peptide of LCMV, Lassa virus, Pichinde virus, Oliveros virus, Tamiami virus, Mobala virus, Mopeia virus, Ippy virus, Amapari virus, Flexal virus, Guanarito virus, Latino virus, Machupo virus, Parana virus, Pirital virus, Sabia virus, Tacaribe virus, Bear Canyon virus, Whitewater Arroyo virus, Allpahuayo virus (ALLV), Alxa virus, Chapare virus, Lijiang virus, Cupixi virus, Gairo virus, Loei River virus, Lujo virus, Luna virus, Luli virus, Lunk virus, Mariental virus, Merino Walk virus, Morogoro virus, Okahandja virus, Apore virus, Ryukyu virus, Solwezi virus, souris virus, Wenzhou virus, Big Brushy Tank virus, Catarina virus, Skinner Tank virus, Tonto Creek virus, Xapuri virus, or Junin virus. In certain embodiments, the functional fragment is selected from the group consisting of the n region, hydrophobic region 1 (h-1 region) and hydrophobic region 2 (h-2 region) of the arenavirus GP signal peptide (fused to a buffer peptide as described herein). In certain embodiments, the functional fragment is the n region of the arenavirus GP signal peptide and a buffer peptide. In certain embodiments, the functional fragment is the h-1 region of the arenavirus GP signal peptide and a buffer peptide. In certain embodiments, the functional fragment is the h-2 region of the arenavirus GP signal peptide and a buffer peptide.

[0104] In certain embodiments, the functional fragment as described herein is a fragment of a polypeptide that comprises an amino acid sequence that is at least 80% identical to the amino acid sequence of SEQ ID NO:1, SEQ ID NO:2, SEQ ID NO:3, SEQ ID NO:4, SEQ ID NO:5, SEQ ID NO:6, SEQ ID NO:7, SEQ ID NO:8, SEQ ID NO:9, SEQ ID NO:10, SEQ ID NO:11, SEQ ID NO:12, SEQ ID NO:13, SEQ ID NO:14, SEQ ID NO:15, SEQ ID NO:16, SEQ ID NO:17, SEQ ID NO:18, SEQ ID NO:19, SEQ ID NO:20, SEQ ID NO:21, SEQ ID NO:22, SEQ ID NO:23, SEQ ID NO:24, SEQ ID NO:48, SEQ ID NO:52, SEQ ID NO:59, SEQ ID NO:66, SEQ ID NO:73, SEQ ID NO:80, SEQ ID NO:84, SEQ ID NO:91, SEQ ID NO:98, SEQ ID NO:105, SEQ ID NO:109, SEQ ID NO:113, SEQ ID NO:120, SEQ ID NO:127, SEQ ID NO:134, SEQ ID NO:49, SEQ ID NO:56, SEQ ID NO:63, SEQ ID NO:70, SEQ ID NO:77, SEQ ID NO:81, SEQ ID NO:88, SEQ ID NO:95, SEQ ID NO:102, SEQ ID NO:106, SEQ ID NO:110, SEQ ID NO:117, SEQ ID NO:124, SEQ ID NO:131, SEQ ID NO:138, SEQ ID NO:50, SEQ ID NO:57, SEQ ID NO:64, SEQ ID NO:71, SEQ ID NO:78, SEQ ID NO:82, SEQ ID NO:89, SEQ ID NO:96, SEQ ID NO:103, SEQ ID NO:107, SEQ ID NO:111, SEQ ID NO:118, SEQ ID NO:125, SEQ ID NO:132, SEQ ID NO:139, SEQ ID NO:51, SEQ ID NO:58, SEQ ID NO:65, SEQ ID NO:72, SEQ ID NO:79, SEQ ID NO:83, SEQ ID NO:90, SEQ ID NO:97, SEQ ID NO:104, SEQ ID NO:108, SEQ ID NO:112, SEQ ID NO: 119, SEQ ID NO:126, SEQ ID NO:133, or SEQ ID NO:140. In certain embodiments, the functional fragment as described herein is a fragment of a polypeptide that comprises an amino acid sequence that is at least 85% identical to the amino acid sequence of SEQ ID NO:1, SEQ ID NO:2, SEQ ID NO:3, SEQ ID NO:4, SEQ ID NO:5, SEQ ID NO:6, SEQ ID NO:7, SEQ ID NO:8, SEQ ID NO:9, SEQ ID NO:10, SEQ ID NO:11, SEQ ID NO:12, SEQ ID NO:13, SEQ ID NO:14, SEQ ID NO:15, SEQ ID NO:16, SEQ ID NO:17, SEQ ID NO:18, SEQ ID NO:19, SEQ ID NO:20, SEQ ID NO:21, SEQ ID NO:22, SEQ ID NO:23, SEQ ID NO:24, SEQ ID NO:48, SEQ ID NO:52, SEQ ID NO:59, SEQ ID NO:66, SEQ ID NO:73, SEQ ID NO:80, SEQ ID NO:84, SEQ ID NO:91, SEQ ID NO:98, SEQ ID NO:105, SEQ ID NO:109, SEQ ID NO: 113, SEQ ID NO:120, SEQ ID NO:127, SEQ ID NO:134, SEQ ID NO:49, SEQ ID NO:56, SEQ ID NO:63, SEQ ID NO:70, SEQ ID NO:77, SEQ ID NO:81, SEQ ID NO:88, SEQ ID NO:95, SEQ ID NO:102, SEQ ID NO:106, SEQ ID NO:110, SEQ ID NO:117, SEQ ID NO:124, SEQ ID NO:131, SEQ ID NO:138, SEQ ID NO:50, SEQ ID NO:57, SEQ ID NO:64, SEQ ID NO:71, SEQ ID NO:78, SEQ ID NO:82, SEQ ID NO:89, SEQ ID NO:96, SEQ ID NO:103, SEQ ID NO: 107, SEQ ID NO:111, SEQ ID NO: 118, SEQ ID NO:125, SEQ ID NO:132, SEQ ID NO:139, SEQ ID NO:51, SEQ ID NO:58, SEQ ID NO:65, SEQ ID NO:72, SEQ ID NO:79, SEQ ID NO:83, SEQ ID NO:90, SEQ ID NO:97, SEQ ID NO:104, SEQ ID NO:108, SEQ ID NO:112, SEQ ID NO:119, SEQ ID NO:126, SEQ ID NO:133, or SEQ ID NO:140. In certain embodiments, the functional fragment as described herein is a fragment of a polypeptide that comprises an amino acid sequence that is at least 90% identical to the amino acid sequence of SEQ ID NO:1, SEQ ID NO:2, SEQ ID NO:3, SEQ ID NO:4, SEQ ID NO:5, SEQ ID NO:6, SEQ ID NO:7, SEQ ID NO:8, SEQ ID NO:9, SEQ ID NO:10, SEQ ID NO: 11, SEQ ID NO:12, SEQ ID NO:13, SEQ ID NO:14, SEQ ID NO:15, SEQ ID NO:16, SEQ ID NO:17, SEQ ID NO:18, SEQ ID NO:19, SEQ ID NO:20, SEQ ID NO:21, SEQ ID NO:22, SEQ ID NO:23, SEQ ID NO:24, SEQ ID NO:48, SEQ ID NO:52, SEQ ID NO:59, SEQ ID NO:66, SEQ ID NO:73, SEQ ID NO:80, SEQ ID NO:84, SEQ ID NO:91, SEQ ID NO:98, SEQ ID NO:105, SEQ ID NO:109, SEQ ID NO:113, SEQ ID NO:120, SEQ ID NO:127, SEQ ID NO:134, SEQ ID NO:49, SEQ ID NO:56, SEQ ID NO:63, SEQ ID NO:70, SEQ ID NO:77, SEQ ID NO:81, SEQ ID NO:88, SEQ ID NO:95, SEQ ID NO:102, SEQ ID NO: 106, SEQ ID NO:110, SEQ ID NO: 117, SEQ ID NO:124, SEQ ID NO:131, SEQ ID NO:138, SEQ ID NO:50, SEQ ID NO:57, SEQ ID NO:64, SEQ ID NO:71, SEQ ID NO:78, SEQ ID NO:82, SEQ ID NO:89, SEQ ID NO:96, SEQ ID NO:103, SEQ ID NO:107, SEQ ID NO:111, SEQ ID NO:118, SEQ ID NO:125, SEQ ID NO:132, SEQ ID NO:139, SEQ ID NO:51, SEQ ID NO:58, SEQ ID NO:65, SEQ ID NO:72, SEQ ID NO:79, SEQ ID NO:83, SEQ ID NO:90, SEQ ID NO:97, SEQ ID NO:104, SEQ ID NO: 108, SEQ ID NO: 112, SEQ ID NO: 119, SEQ ID NO: 126, SEQ ID NO: 133, or SEQ ID NO:140. In certain embodiments, the functional fragment as described herein is a fragment of a polypeptide that comprises an amino acid sequence that is at least 95% identical to the amino acid sequence of SEQ ID NO:1, SEQ ID NO:2, SEQ ID NO:3, SEQ ID NO:4, SEQ ID NO:5, SEQ ID NO:6, SEQ ID NO:7, SEQ ID NO:8, SEQ ID NO:9, SEQ ID NO:10, SEQ ID NO:11, SEQ ID NO:12, SEQ ID NO:13, SEQ ID NO:14, SEQ ID NO:15, SEQ ID NO:16, SEQ ID NO:17, SEQ ID NO:18, SEQ ID NO:19, SEQ ID NO:20, SEQ ID NO:21, SEQ ID NO:22, SEQ ID NO:23, SEQ ID NO:24, SEQ ID NO:48, SEQ ID NO:52, SEQ ID NO:59, SEQ ID NO:66, SEQ ID NO:73, SEQ ID NO:80, SEQ ID NO:84, SEQ ID NO:91, SEQ ID NO:98, SEQ ID NO:105, SEQ ID NO:109, SEQ ID NO:113, SEQ ID NO:120, SEQ ID NO:127, SEQ ID NO:134, SEQ ID NO:49, SEQ ID NO:56, SEQ ID NO:63, SEQ ID NO:70, SEQ ID NO:77, SEQ ID NO:81, SEQ ID NO:88, SEQ ID NO:95, SEQ ID NO:102, SEQ ID NO:106, SEQ ID NO:110, SEQ ID NO: 117, SEQ ID NO:124, SEQ ID NO:131, SEQ ID NO:138, SEQ ID NO:50, SEQ ID NO:57, SEQ ID NO:64, SEQ ID NO:71, SEQ ID NO:78, SEQ ID NO:82, SEQ ID NO:89, SEQ ID NO:96, SEQ ID NO:103, SEQ ID NO:107, SEQ ID NO:111, SEQ ID NO:118, SEQ ID NO:125, SEQ ID NO:132, SEQ ID NO:139, SEQ ID NO:51, SEQ ID NO:58, SEQ ID NO:65, SEQ ID NO:72, SEQ ID NO:79, SEQ ID NO:83, SEQ ID NO:90, SEQ ID NO:97, SEQ ID NO:104, SEQ ID NO:108, SEQ ID NO: 112, SEQ ID NO: 119, SEQ ID NO:126, SEQ ID NO:133, or SEQ ID NO:140. In certain embodiments, the functional fragment as described herein is a fragment of a polypeptide that comprises an amino acid sequence that is at least 96% identical to the amino acid sequence of SEQ ID NO:1, SEQ ID NO:2, SEQ ID NO:3, SEQ ID NO:4, SEQ ID NO:5, SEQ ID NO:6, SEQ ID NO:7, SEQ ID NO:8, SEQ ID NO:9, SEQ ID NO:10, SEQ ID NO:11, SEQ ID NO:12, SEQ ID NO:13, SEQ ID NO:14, SEQ ID NO:15, SEQ ID NO:16, SEQ ID NO:17, SEQ ID NO:18, SEQ ID NO:19, SEQ ID NO:20, SEQ ID NO:21, SEQ ID NO:22, SEQ ID NO:23, SEQ ID NO:24, SEQ ID NO:48, SEQ ID NO:52, SEQ ID NO:59, SEQ ID NO:66, SEQ ID NO:73, SEQ ID NO:80, SEQ ID NO:84, SEQ ID NO:91, SEQ ID NO:98, SEQ ID NO:105, SEQ ID NO:109, SEQ ID NO:113, SEQ ID NO:120, SEQ ID NO:127, SEQ ID NO:134, SEQ ID NO:49, SEQ ID NO:56, SEQ ID NO:63, SEQ ID NO:70, SEQ ID NO:77, SEQ ID NO:81, SEQ ID NO:88, SEQ ID NO:95, SEQ ID NO:102, SEQ ID NO:106, SEQ ID NO:110, SEQ ID NO:117, SEQ ID NO:124, SEQ ID NO:131, SEQ ID NO:138, SEQ ID NO:50, SEQ ID NO:57, SEQ ID NO:64, SEQ ID NO:71, SEQ ID NO:78, SEQ ID NO:82, SEQ ID NO:89, SEQ ID NO:96, SEQ ID NO:103, SEQ ID NO:107, SEQ ID NO:111, SEQ ID NO:118, SEQ ID NO:125, SEQ ID NO:132, SEQ ID NO:139, SEQ ID NO:51, SEQ ID NO:58, SEQ ID NO:65, SEQ ID NO:72, SEQ ID NO:79, SEQ ID NO:83, SEQ ID NO:90, SEQ ID NO:97, SEQ ID NO:104, SEQ ID NO:108, SEQ ID NO:112, SEQ ID NO: 119, SEQ ID NO:126, SEQ ID NO:133, or SEQ ID NO:140. In certain embodiments, the functional fragment as described herein is a fragment of a polypeptide that comprises an amino acid sequence that is at least 97% identical to the amino acid sequence of SEQ ID NO:1, SEQ ID NO:2, SEQ ID NO:3, SEQ ID NO:4, SEQ ID NO:5, SEQ ID NO:6, SEQ ID NO:7, SEQ ID NO:8, SEQ ID NO:9, SEQ ID NO:10, SEQ ID NO:11, SEQ ID NO:12, SEQ ID NO:13, SEQ ID NO:14, SEQ ID NO:15, SEQ ID NO:16, SEQ ID NO:17, SEQ ID NO:18, SEQ ID NO:19, SEQ ID NO:20, SEQ ID NO:21, SEQ ID NO:22, SEQ ID NO:23, SEQ ID NO:24, SEQ ID NO:48, SEQ ID NO:52, SEQ ID NO:59, SEQ ID NO:66, SEQ ID NO:73, SEQ ID NO:80, SEQ ID NO:84, SEQ ID NO:91, SEQ ID NO:98, SEQ ID NO:105, SEQ ID NO:109, SEQ ID NO: 113, SEQ ID NO:120, SEQ ID NO:127, SEQ ID NO:134, SEQ ID NO:49, SEQ ID NO:56, SEQ ID NO:63, SEQ ID NO:70, SEQ ID NO:77, SEQ ID NO:81, SEQ ID NO:88, SEQ ID NO:95, SEQ ID NO:102, SEQ ID NO:106, SEQ ID NO:110, SEQ ID NO:117, SEQ ID NO:124, SEQ ID NO:131, SEQ ID NO:138, SEQ ID NO:50, SEQ ID NO:57, SEQ ID NO:64, SEQ ID NO:71, SEQ ID NO:78, SEQ ID NO:82, SEQ ID NO:89, SEQ ID NO:96, SEQ ID NO:103, SEQ ID NO: 107, SEQ ID NO:111, SEQ ID NO: 118, SEQ ID NO:125, SEQ ID NO:132, SEQ ID NO:139, SEQ ID NO:51, SEQ ID NO:58, SEQ ID NO:65, SEQ ID NO:72, SEQ ID NO:79, SEQ ID NO:83, SEQ ID NO:90, SEQ ID NO:97, SEQ ID NO:104, SEQ ID NO:108, SEQ ID NO:112, SEQ ID NO:119, SEQ ID NO:126, SEQ ID NO:133, or SEQ ID NO:140. In certain embodiments, the functional fragment as described herein is a fragment of a polypeptide that comprises an amino acid sequence that is at least 98% identical to the amino acid sequence of SEQ ID NO:1, SEQ ID NO:2, SEQ ID NO:3, SEQ ID NO:4, SEQ ID NO:5, SEQ ID NO:6, SEQ ID NO:7, SEQ ID NO:8, SEQ ID NO:9, SEQ ID NO:10, SEQ ID NO: 11, SEQ ID NO:12, SEQ ID NO:13, SEQ ID NO:14, SEQ ID NO:15, SEQ ID NO:16, SEQ ID NO:17, SEQ ID NO:18, SEQ ID NO:19, SEQ ID NO:20, SEQ ID NO:21, SEQ ID NO:22, SEQ ID NO:23, SEQ ID NO:24, SEQ ID NO:48, SEQ ID NO:52, SEQ ID NO:59, SEQ ID NO:66, SEQ ID NO:73, SEQ ID NO:80, SEQ ID NO:84, SEQ ID NO:91, SEQ ID NO:98, SEQ ID NO:105, SEQ ID NO:109, SEQ ID NO:113, SEQ ID NO:120, SEQ ID NO:127, SEQ ID NO:134, SEQ ID NO:49, SEQ ID NO:56, SEQ ID NO:63, SEQ ID NO:70, SEQ ID NO:77, SEQ ID NO:81, SEQ ID NO:88, SEQ ID NO:95, SEQ ID NO:102, SEQ ID NO: 106, SEQ ID NO:110, SEQ ID NO: 117, SEQ ID NO:124, SEQ ID NO:131, SEQ ID NO:138, SEQ ID NO:50, SEQ ID NO:57, SEQ ID NO:64, SEQ ID NO:71, SEQ ID NO:78, SEQ ID NO:82, SEQ ID NO:89, SEQ ID NO:96, SEQ ID NO:103, SEQ ID NO:107, SEQ ID NO:111, SEQ ID NO:118, SEQ ID NO:125, SEQ ID NO:132, SEQ ID NO:139, SEQ ID NO:51, SEQ ID NO:58, SEQ ID NO:65, SEQ ID NO:72, SEQ ID NO:79, SEQ ID NO:83, SEQ ID NO:90, SEQ ID NO:97, SEQ ID NO:104, SEQ ID NO:108, SEQ ID NO:112, SEQ ID NO:119, SEQ ID NO:126, SEQ ID NO:133, or SEQ ID NO:140. In certain embodiments, the functional fragment as described herein is a fragment of a polypeptide that comprises an amino acid sequence that is at least 99% identical to the amino acid sequence of SEQ ID NO:1, SEQ ID NO:2, SEQ ID NO:3, SEQ ID NO:4, SEQ ID NO:5, SEQ ID NO:6, SEQ ID NO:7, SEQ ID NO:8, SEQ ID NO:9, SEQ ID NO:10, SEQ ID NO:11, SEQ ID NO:12, SEQ ID NO:13, SEQ ID NO:14, SEQ ID NO:15, SEQ ID NO:16, SEQ ID NO:17, SEQ ID NO:18, SEQ ID NO:19, SEQ ID NO:20, SEQ ID NO:21, SEQ ID NO:22, SEQ ID NO:23, SEQ ID NO:24, SEQ ID NO:48, SEQ ID NO:52, SEQ ID NO:59, SEQ ID NO:66, SEQ ID NO:73, SEQ ID NO:80, SEQ ID NO:84, SEQ ID NO:91, SEQ ID NO:98, SEQ ID NO:105, SEQ ID NO:109, SEQ ID NO:113, SEQ ID NO:120, SEQ ID NO:127, SEQ ID NO:134, SEQ ID NO:49, SEQ ID NO:56, SEQ ID NO:63, SEQ ID NO:70, SEQ ID NO:77, SEQ ID NO:81, SEQ ID NO:88, SEQ ID NO:95, SEQ ID NO:102, SEQ ID NO:106, SEQ ID NO:110, SEQ ID NO: 117, SEQ ID NO:124, SEQ ID NO:131, SEQ ID NO:138, SEQ ID NO:50, SEQ ID NO:57, SEQ ID NO:64, SEQ ID NO:71, SEQ ID NO:78, SEQ ID NO:82, SEQ ID NO:89, SEQ ID NO:96, SEQ ID NO:103, SEQ ID NO:107, SEQ ID NO:111, SEQ ID NO:118, SEQ ID NO:125, SEQ ID NO:132, SEQ ID NO:139, SEQ ID NO:51, SEQ ID NO:58, SEQ ID NO:65, SEQ ID NO:72, SEQ ID NO:79, SEQ ID NO:83, SEQ ID NO:90, SEQ ID NO:97, SEQ ID NO:104, SEQ ID NO:108, SEQ ID NO: 112, SEQ ID NO: 119, SEQ ID NO:126, SEQ ID NO:133, or SEQ ID NO:140. In certain embodiments, the functional fragment as described herein is a fragment of a polypeptide that comprises an amino acid sequence that is 100% identical to the amino acid sequence of SEQ ID NO:1, SEQ ID NO:2, SEQ ID NO:3, SEQ ID NO:4, SEQ ID NO:5, SEQ ID NO:6, SEQ ID NO:7, SEQ ID NO:8, SEQ ID NO:9, SEQ ID NO:10, SEQ ID NO:11, SEQ ID NO:12, SEQ ID NO:13, SEQ ID NO:14, SEQ ID NO:15, SEQ ID NO:16, SEQ ID NO:17, SEQ ID NO:18, SEQ ID NO:19, SEQ ID NO:20, SEQ ID NO:21, SEQ ID NO:22, SEQ ID NO:23, SEQ ID NO:24, SEQ ID NO:48, SEQ ID NO:52, SEQ ID NO:59, SEQ ID NO:66, SEQ ID NO:73, SEQ ID NO:80, SEQ ID NO:84, SEQ ID NO:91, SEQ ID NO:98, SEQ ID NO:105, SEQ ID NO:109, SEQ ID NO:113, SEQ ID NO:120, SEQ ID NO:127, SEQ ID NO:134, SEQ ID NO:49, SEQ ID NO:56, SEQ ID NO:63, SEQ ID NO:70, SEQ ID NO:77, SEQ ID NO:81, SEQ ID NO:88, SEQ ID NO:95, SEQ ID NO:102, SEQ ID NO:106, SEQ ID NO:110, SEQ ID NO:117, SEQ ID NO:124, SEQ ID NO:131, SEQ ID NO:138, SEQ ID NO:50, SEQ ID NO:57, SEQ ID NO:64, SEQ ID NO:71, SEQ ID NO:78, SEQ ID NO:82, SEQ ID NO:89, SEQ ID NO:96, SEQ ID NO:103, SEQ ID NO:107, SEQ ID NO:111, SEQ ID NO:118, SEQ ID NO:125, SEQ ID NO:132, SEQ ID NO:139, SEQ ID NO:51, SEQ ID NO:58, SEQ ID NO:65, SEQ ID NO:72, SEQ ID NO:79, SEQ ID NO:83, SEQ ID NO:90, SEQ ID NO:97, SEQ ID NO:104, SEQ ID NO:108, SEQ ID NO:112, SEQ ID NO:119, SEQ ID NO:126, SEQ ID NO:133, or SEQ ID NO: 140. In certain embodiments, the functional fragment as described herein is a fragment of a polypeptide that comprises an amino acid sequence that is 80% identical to the amino acid sequence of SEQ ID NO:1, SEQ ID NO:2, SEQ ID NO:3, SEQ ID NO:4, SEQ ID NO:5, SEQ ID NO:6, SEQ ID NO:7, SEQ ID NO:8, SEQ ID NO:9, SEQ ID NO:10, SEQ ID NO: 11, SEQ ID NO:12, SEQ ID NO:13, SEQ ID NO:14, SEQ ID NO:15, SEQ ID NO:16, SEQ ID NO:17, SEQ ID NO:18, SEQ ID NO:19, SEQ ID NO:20, SEQ ID NO:21, SEQ ID NO:22, SEQ ID NO:23, SEQ ID NO:24, SEQ ID NO:48, SEQ ID NO:52, SEQ ID NO:59, SEQ ID NO:66, SEQ ID NO:73, SEQ ID NO:80, SEQ ID NO:84, SEQ ID NO:91, SEQ ID NO:98, SEQ ID NO:105, SEQ ID NO:109, SEQ ID NO: 113, SEQ ID NO:120, SEQ ID NO:127, SEQ ID NO:134, SEQ ID NO:49, SEQ ID NO:56, SEQ ID NO:63, SEQ ID NO:70, SEQ ID NO:77, SEQ ID NO:81, SEQ ID NO:88, SEQ ID NO:95, SEQ ID NO:102, SEQ ID NO: 106, SEQ ID NO:110, SEQ ID NO: 117, SEQ ID NO:124, SEQ ID NO:131, SEQ ID NO:138, SEQ ID NO:50, SEQ ID NO:57, SEQ ID NO:64, SEQ ID NO:71, SEQ ID NO:78, SEQ ID NO:82, SEQ ID NO:89, SEQ ID NO:96, SEQ ID NO:103, SEQ ID NO:107, SEQ ID NO:111, SEQ ID NO:118, SEQ ID NO:125, SEQ ID NO:132, SEQ ID NO:139, SEQ ID NO:51, SEQ ID NO:58, SEQ ID NO:65, SEQ ID NO:72, SEQ ID NO:79, SEQ ID NO:83, SEQ ID NO:90, SEQ ID NO:97, SEQ ID NO:104, SEQ ID NO:108, SEQ ID NO:112, SEQ ID NO:119, SEQ ID NO:126, SEQ ID NO:133, or SEQ ID NO:140. In certain embodiments, the functional fragment as described herein is a fragment of a polypeptide that comprises an amino acid sequence that is 85% identical to the amino acid sequence of SEQ ID NO:1, SEQ ID NO:2, SEQ ID NO:3, SEQ ID NO:4, SEQ ID NO:5, SEQ ID NO:6, SEQ ID NO:7, SEQ ID NO:8, SEQ ID NO:9, SEQ ID NO:10, SEQ ID NO:11, SEQ ID NO:12, SEQ ID NO:13, SEQ ID NO:14, SEQ ID NO:15, SEQ ID NO:16, SEQ ID NO:17, SEQ ID NO:18, SEQ ID NO:19, SEQ ID NO:20, SEQ ID NO:21, SEQ ID NO:22, SEQ ID NO:23, SEQ ID NO:24, SEQ ID NO:48, SEQ ID NO:52, SEQ ID NO:59, SEQ ID NO:66, SEQ ID NO:73, SEQ ID NO:80, SEQ ID NO:84, SEQ ID NO:91, SEQ ID NO:98, SEQ ID NO:105, SEQ ID NO:109, SEQ ID NO:113, SEQ ID NO:120, SEQ ID NO:127, SEQ ID NO:134, SEQ ID NO:49, SEQ ID NO:56, SEQ ID NO:63, SEQ ID NO:70, SEQ ID NO:77, SEQ ID NO:81, SEQ ID NO:88, SEQ ID NO:95, SEQ ID NO:102, SEQ ID NO:106, SEQ ID NO:110, SEQ ID NO:117, SEQ ID NO:124, SEQ ID NO:131, SEQ ID NO:138, SEQ ID NO:50, SEQ ID NO:57, SEQ ID NO:64, SEQ ID NO:71, SEQ ID NO:78, SEQ ID NO:82, SEQ ID NO:89, SEQ ID NO:96, SEQ ID NO:103, SEQ ID NO:107, SEQ ID NO:111, SEQ ID NO:118, SEQ ID NO:125, SEQ ID NO:132, SEQ ID NO:139, SEQ ID NO:51, SEQ ID NO:58, SEQ ID NO:65, SEQ ID NO:72, SEQ ID NO:79, SEQ ID NO:83, SEQ ID NO:90, SEQ ID NO:97, SEQ ID NO:104, SEQ ID NO:108, SEQ ID NO:112, SEQ ID NO: 119, SEQ ID NO:126, SEQ ID NO:133, or SEQ ID NO:140. In certain embodiments, the functional fragment as described herein is a fragment of a polypeptide that comprises an amino acid sequence that is 90% identical to the amino acid sequence of SEQ ID NO:1, SEQ ID NO:2, SEQ ID NO:3, SEQ ID NO:4, SEQ ID NO:5, SEQ ID NO:6, SEQ ID NO:7, SEQ ID NO:8, SEQ ID NO:9, SEQ ID NO:10, SEQ ID NO: 11, SEQ ID NO:12, SEQ ID NO:13, SEQ ID NO:14, SEQ ID NO:15, SEQ ID NO:16, SEQ ID NO:17, SEQ ID NO:18, SEQ ID NO:19, SEQ ID NO:20, SEQ ID NO:21, SEQ ID NO:22, SEQ ID NO:23, SEQ ID NO:24, SEQ ID NO:48, SEQ ID NO:52, SEQ ID NO:59, SEQ ID NO:66, SEQ ID NO:73, SEQ ID NO:80, SEQ ID NO:84, SEQ ID NO:91, SEQ ID NO:98, SEQ ID NO:105, SEQ ID NO:109, SEQ ID NO: 113, SEQ ID NO:120, SEQ ID NO:127, SEQ ID NO:134, SEQ ID NO:49, SEQ ID NO:56, SEQ ID NO:63, SEQ ID NO:70, SEQ ID NO:77, SEQ ID NO:81, SEQ ID NO:88, SEQ ID NO:95, SEQ ID NO:102, SEQ ID NO: 106, SEQ ID NO:110, SEQ ID NO: 117, SEQ ID NO:124, SEQ ID NO:131, SEQ ID NO:138, SEQ ID NO:50, SEQ ID NO:57, SEQ ID NO:64, SEQ ID NO:71, SEQ ID NO:78, SEQ ID NO:82, SEQ ID NO:89, SEQ ID NO:96, SEQ ID NO:103, SEQ ID NO:107, SEQ ID NO:111, SEQ ID NO:118, SEQ ID NO:125, SEQ ID NO:132, SEQ ID NO:139, SEQ ID NO:51, SEQ ID NO:58, SEQ ID NO:65, SEQ ID NO:72, SEQ ID NO:79, SEQ ID NO:83, SEQ ID NO:90, SEQ ID NO:97, SEQ ID NO:104, SEQ ID NO:108, SEQ ID NO:112, SEQ ID NO:119, SEQ ID NO:126, SEQ ID NO:133, or SEQ ID NO:140. In certain embodiments, the functional fragment as described herein is a fragment of a polypeptide that comprises an amino acid sequence that is 95% identical to the amino acid sequence of SEQ ID NO:1, SEQ ID NO:2, SEQ ID NO:3, SEQ ID NO:4, SEQ ID NO:5, SEQ ID NO:6, SEQ ID NO:7, SEQ ID NO:8, SEQ ID NO:9, SEQ ID NO:10, SEQ ID NO:11, SEQ ID NO:12, SEQ ID NO:13, SEQ ID NO:14, SEQ ID NO:15, SEQ ID NO:16, SEQ ID NO:17, SEQ ID NO:18, SEQ ID NO:19, SEQ ID NO:20, SEQ ID NO:21, SEQ ID NO:22, SEQ ID NO:23, SEQ ID NO:24, SEQ ID NO:48, SEQ ID NO:52, SEQ ID NO:59, SEQ ID NO:66, SEQ ID NO:73, SEQ ID NO:80, SEQ ID NO:84, SEQ ID NO:91, SEQ ID NO:98, SEQ ID NO:105, SEQ ID NO:109, SEQ ID NO:113, SEQ ID NO:120, SEQ ID NO:127, SEQ ID NO:134, SEQ ID NO:49, SEQ ID NO:56, SEQ ID NO:63, SEQ ID NO:70, SEQ ID NO:77, SEQ ID NO:81, SEQ ID NO:88, SEQ ID NO:95, SEQ ID NO:102, SEQ ID NO:106, SEQ ID NO:110, SEQ ID NO:117, SEQ ID NO:124, SEQ ID NO:131, SEQ ID NO:138, SEQ ID NO:50, SEQ ID NO:57, SEQ ID NO:64, SEQ ID NO:71, SEQ ID NO:78, SEQ ID NO:82, SEQ ID NO:89, SEQ ID NO:96, SEQ ID NO:103, SEQ ID NO:107, SEQ ID NO:111, SEQ ID NO:118, SEQ ID NO:125, SEQ ID NO:132, SEQ ID NO:139, SEQ ID NO:51, SEQ ID NO:58, SEQ ID NO:65, SEQ ID NO:72, SEQ ID NO:79, SEQ ID NO:83, SEQ ID NO:90, SEQ ID NO:97, SEQ ID NO:104, SEQ ID NO:108, SEQ ID NO:112, SEQ ID NO: 119, SEQ ID NO:126, SEQ ID NO:133, or SEQ ID NO:140. In certain embodiments, the functional fragment as described herein is a fragment of a polypeptide that comprises an amino acid sequence that is 96% identical to the amino acid sequence of SEQ ID NO:1, SEQ ID NO:2, SEQ ID NO:3, SEQ ID NO:4, SEQ ID NO:5, SEQ ID NO:6, SEQ ID NO:7, SEQ ID NO:8, SEQ ID NO:9, SEQ ID NO:10, SEQ ID NO: 11, SEQ ID NO:12, SEQ ID NO:13, SEQ ID NO:14, SEQ ID NO:15, SEQ ID NO:16, SEQ ID NO:17, SEQ ID NO:18, SEQ ID NO:19, SEQ ID NO:20, SEQ ID NO:21, SEQ ID NO:22, SEQ ID NO:23, SEQ ID NO:24, SEQ ID NO:48, SEQ ID NO:52, SEQ ID NO:59, SEQ ID NO:66, SEQ ID NO:73, SEQ ID NO:80, SEQ ID NO:84, SEQ ID NO:91, SEQ ID NO:98, SEQ ID NO:105, SEQ ID NO:109, SEQ ID NO: 113, SEQ ID NO:120, SEQ ID NO:127, SEQ ID NO:134, SEQ ID NO:49, SEQ ID NO:56, SEQ ID NO:63, SEQ ID NO:70, SEQ ID NO:77, SEQ ID NO:81, SEQ ID NO:88, SEQ ID NO:95, SEQ ID NO:102, SEQ ID NO: 106, SEQ ID NO:110, SEQ ID NO: 117, SEQ ID NO:124, SEQ ID NO:131, SEQ ID NO:138, SEQ ID NO:50, SEQ ID NO:57, SEQ ID NO:64, SEQ ID NO:71, SEQ ID NO:78, SEQ ID NO:82, SEQ ID NO:89, SEQ ID NO:96, SEQ ID NO:103, SEQ ID NO:107, SEQ ID NO:111, SEQ ID NO:118, SEQ ID NO:125, SEQ ID NO:132, SEQ ID NO:139, SEQ ID NO:51, SEQ ID NO:58, SEQ ID NO:65, SEQ ID NO:72, SEQ ID NO:79, SEQ ID NO:83, SEQ ID NO:90, SEQ ID NO:97, SEQ ID NO:104, SEQ ID NO:108, SEQ ID NO:112, SEQ ID NO:119, SEQ ID NO:126, SEQ ID NO:133, or SEQ ID NO:140. In certain embodiments, the functional fragment as described herein is a fragment of a polypeptide that comprises an amino acid sequence that is 97% identical to the amino acid sequence of SEQ ID NO:1, SEQ ID NO:2, SEQ ID NO:3, SEQ ID NO:4, SEQ ID NO:5, SEQ ID NO:6, SEQ ID NO:7, SEQ ID NO:8, SEQ ID NO:9, SEQ ID NO:10, SEQ ID NO:11, SEQ ID NO:12, SEQ ID NO:13, SEQ ID NO:14, SEQ ID NO:15, SEQ ID NO:16, SEQ ID NO:17, SEQ ID NO:18, SEQ ID NO:19, SEQ ID NO:20, SEQ ID NO:21, SEQ ID NO:22, SEQ ID NO:23, SEQ ID NO:24, SEQ ID NO:48, SEQ ID NO:52, SEQ ID NO:59, SEQ ID NO:66, SEQ ID NO:73, SEQ ID NO:80, SEQ ID NO:84, SEQ ID NO:91, SEQ ID NO:98, SEQ ID NO:105, SEQ ID NO:109, SEQ ID NO:113, SEQ ID NO:120, SEQ ID NO:127, SEQ ID NO:134, SEQ ID NO:49, SEQ ID NO:56, SEQ ID NO:63, SEQ ID NO:70, SEQ ID NO:77, SEQ ID NO:81, SEQ ID NO:88, SEQ ID NO:95, SEQ ID NO:102, SEQ ID NO:106, SEQ ID NO:110, SEQ ID NO:117, SEQ ID NO:124, SEQ ID NO:131, SEQ ID NO:138, SEQ ID NO:50, SEQ ID NO:57, SEQ ID NO:64, SEQ ID NO:71, SEQ ID NO:78, SEQ ID NO:82, SEQ ID NO:89, SEQ ID NO:96, SEQ ID NO:103, SEQ ID NO:107, SEQ ID NO:111, SEQ ID NO:118, SEQ ID NO:125, SEQ ID NO:132, SEQ ID NO:139, SEQ ID NO:51, SEQ ID NO:58, SEQ ID NO:65, SEQ ID NO:72, SEQ ID NO:79, SEQ ID NO:83, SEQ ID NO:90, SEQ ID NO:97, SEQ ID NO:104, SEQ ID NO:108, SEQ ID NO:112, SEQ ID NO: 119, SEQ ID NO:126, SEQ ID NO:133, or SEQ ID NO:140. In certain embodiments, the functional fragment as described herein is a fragment of a polypeptide that comprises an amino acid sequence that is 98% identical to the amino acid sequence of SEQ ID NO:1, SEQ ID NO:2, SEQ ID NO:3, SEQ ID NO:4, SEQ ID NO:5, SEQ ID NO:6, SEQ ID NO:7, SEQ ID NO:8, SEQ ID NO:9, SEQ ID NO:10, SEQ ID NO: 11, SEQ ID NO:12, SEQ ID NO:13, SEQ ID NO:14, SEQ ID NO:15, SEQ ID NO:16, SEQ ID NO:17, SEQ ID NO:18, SEQ ID NO:19, SEQ ID NO:20, SEQ ID NO:21, SEQ ID NO:22, SEQ ID NO:23, SEQ ID NO:24, SEQ ID NO:48, SEQ ID NO:52, SEQ ID NO:59, SEQ ID NO:66, SEQ ID NO:73, SEQ ID NO:80, SEQ ID NO:84, SEQ ID NO:91, SEQ ID NO:98, SEQ ID NO:105, SEQ ID NO:109, SEQ ID NO: 113, SEQ ID NO:120, SEQ ID NO:127, SEQ ID NO:134, SEQ ID NO:49, SEQ ID NO:56, SEQ ID NO:63, SEQ ID NO:70, SEQ ID NO:77, SEQ ID NO:81, SEQ ID NO:88, SEQ ID NO:95, SEQ ID NO:102, SEQ ID NO: 106, SEQ ID NO:110, SEQ ID NO: 117, SEQ ID NO:124, SEQ ID NO:131, SEQ ID NO:138, SEQ ID NO:50, SEQ ID NO:57, SEQ ID NO:64, SEQ ID NO:71, SEQ ID NO:78, SEQ ID NO:82, SEQ ID NO:89, SEQ ID NO:96, SEQ ID NO:103, SEQ ID NO:107, SEQ ID NO:111, SEQ ID NO:118, SEQ ID NO:125, SEQ ID NO:132, SEQ ID NO:139, SEQ ID NO:51, SEQ ID NO:58, SEQ ID NO:65, SEQ ID NO:72, SEQ ID NO:79, SEQ ID NO:83, SEQ ID NO:90, SEQ ID NO:97, SEQ ID NO:104, SEQ ID NO:108, SEQ ID NO:112, SEQ ID NO:119, SEQ ID NO:126, SEQ ID NO:133, or SEQ ID NO:140. In certain embodiments, the functional fragment as described herein is a fragment of a polypeptide that comprises an amino acid sequence that is 99% identical to the amino acid sequence of SEQ ID NO:1, SEQ ID NO:2, SEQ ID NO:3, SEQ ID NO:4, SEQ ID NO:5, SEQ ID NO:6, SEQ ID NO:7, SEQ ID NO:8, SEQ ID NO:9, SEQ ID NO:10, SEQ ID NO:11, SEQ ID NO:12, SEQ ID NO:13, SEQ ID NO:14, SEQ ID NO:15, SEQ ID NO:16, SEQ ID NO:17, SEQ ID NO:18, SEQ ID NO:19, SEQ ID NO:20, SEQ ID NO:21, SEQ ID NO:22, SEQ ID NO:23, SEQ ID NO:24, SEQ ID NO:48, SEQ ID NO:52, SEQ ID NO:59, SEQ ID NO:66, SEQ ID NO:73, SEQ ID NO:80, SEQ ID NO:84, SEQ ID NO:91, SEQ ID NO:98, SEQ ID NO:105, SEQ ID NO:109, SEQ ID NO:113, SEQ ID NO:120, SEQ ID NO:127, SEQ ID NO:134, SEQ ID NO:49, SEQ ID NO:56, SEQ ID NO:63, SEQ ID NO:70, SEQ ID NO:77, SEQ ID NO:81, SEQ ID NO:88, SEQ ID NO:95, SEQ ID NO:102, SEQ ID NO:106, SEQ ID NO:110, SEQ ID NO:117, SEQ ID NO:124, SEQ ID NO:131, SEQ ID NO:138, SEQ ID NO:50, SEQ ID NO:57, SEQ ID NO:64, SEQ ID NO:71, SEQ ID NO:78, SEQ ID NO:82, SEQ ID NO:89, SEQ ID NO:96, SEQ ID NO:103, SEQ ID NO:107, SEQ ID NO:111, SEQ ID NO:118, SEQ ID NO:125, SEQ ID NO:132, SEQ ID NO:139, SEQ ID NO:51, SEQ ID NO:58, SEQ ID NO:65, SEQ ID NO:72, SEQ ID NO:79, SEQ ID NO:83, SEQ ID NO:90, SEQ ID NO:97, SEQ ID NO:104, SEQ ID NO: 108, SEQ ID NO:112, SEQ ID NO:119, SEQ ID NO:126, SEQ ID NO:133, or SEQ ID NO: 140.

[0105] In certain embodiments, the functional fragment as described herein comprises an amino acid that is at least 80% identical to the amino acid sequence of a fragment of a polypeptide comprising the amino acid sequence of SEQ ID NO:1, SEQ ID NO:2, SEQ ID NO:3, SEQ ID NO:4, SEQ ID NO:5, SEQ ID NO:6, SEQ ID NO:7, SEQ ID NO:8, SEQ ID NO:9, SEQ ID NO:10, SEQ ID NO: 11, SEQ ID NO:12, SEQ ID NO:13, SEQ ID NO:14, SEQ ID NO:15, SEQ ID NO:16, SEQ ID NO:17, SEQ ID NO:18, SEQ ID NO:19, SEQ ID NO:20, SEQ ID NO:21, SEQ ID NO:22, SEQ ID NO:23, SEQ ID NO:24, SEQ ID NO:48, SEQ ID NO:52, SEQ ID NO:59, SEQ ID NO:66, SEQ ID NO:73, SEQ ID NO:80, SEQ ID NO:84, SEQ ID NO:91, SEQ ID NO:98, SEQ ID NO:105, SEQ ID NO:109, SEQ ID NO:113, SEQ ID NO:120, SEQ ID NO:127, SEQ ID NO:134, SEQ ID NO:49, SEQ ID NO:56, SEQ ID NO:63, SEQ ID NO:70, SEQ ID NO:77, SEQ ID NO:81, SEQ ID NO:88, SEQ ID NO:95, SEQ ID NO:102, SEQ ID NO: 106, SEQ ID NO:110, SEQ ID NO: 117, SEQ ID NO:124, SEQ ID NO:131, SEQ ID NO:138, SEQ ID NO:50, SEQ ID NO:57, SEQ ID NO:64, SEQ ID NO:71, SEQ ID NO:78, SEQ ID NO:82, SEQ ID NO:89, SEQ ID NO:96, SEQ ID NO:103, SEQ ID NO:107, SEQ ID NO:111, SEQ ID NO:118, SEQ ID NO:125, SEQ ID NO:132, SEQ ID NO:139, SEQ ID NO:51, SEQ ID NO:58, SEQ ID NO:65, SEQ ID NO:72, SEQ ID NO:79, SEQ ID NO:83, SEQ ID NO:90, SEQ ID NO:97, SEQ ID NO:104, SEQ ID NO:108, SEQ ID NO:112, SEQ ID NO:119, SEQ ID NO:126, SEQ ID NO:133, or SEQ ID NO:140. In certain embodiments, the functional fragment as described herein comprises an amino acid that is at least 85% identical to the amino acid sequence of a fragment of a polypeptide comprising the amino acid sequence of SEQ ID NO:1, SEQ ID NO:2, SEQ ID NO:3, SEQ ID NO:4, SEQ ID NO:5, SEQ ID NO:6, SEQ ID NO:7, SEQ ID NO:8, SEQ ID NO:9, SEQ ID NO:10, SEQ ID NO:11, SEQ ID NO:12, SEQ ID NO:13, SEQ ID NO:14, SEQ ID NO:15, SEQ ID NO:16, SEQ ID NO:17, SEQ ID NO:18, SEQ ID NO:19, SEQ ID NO:20, SEQ ID NO:21, SEQ ID NO:22, SEQ ID NO:23, SEQ ID NO:24, SEQ ID NO:48, SEQ ID NO:52, SEQ ID NO:59, SEQ ID NO:66, SEQ ID NO:73, SEQ ID NO:80, SEQ ID NO:84, SEQ ID NO:91, SEQ ID NO:98, SEQ ID NO:105, SEQ ID NO:109, SEQ ID NO:113, SEQ ID NO:120, SEQ ID NO:127, SEQ ID NO:134, SEQ ID NO:49, SEQ ID NO:56, SEQ ID NO:63, SEQ ID NO:70, SEQ ID NO:77, SEQ ID NO:81, SEQ ID NO:88, SEQ ID NO:95, SEQ ID NO:102, SEQ ID NO: 106, SEQ ID NO:110, SEQ ID NO: 117, SEQ ID NO:124, SEQ ID NO:131, SEQ ID NO:138, SEQ ID NO:50, SEQ ID NO:57, SEQ ID NO:64, SEQ ID NO:71, SEQ ID NO:78, SEQ ID NO:82, SEQ ID NO:89, SEQ ID NO:96, SEQ ID NO:103, SEQ ID NO:107, SEQ ID NO:111, SEQ ID NO:118, SEQ ID NO:125, SEQ ID NO:132, SEQ ID NO:139, SEQ ID NO:51, SEQ ID NO:58, SEQ ID NO:65, SEQ ID NO:72, SEQ ID NO:79, SEQ ID NO:83, SEQ ID NO:90, SEQ ID NO:97, SEQ ID NO:104, SEQ ID NO:108, SEQ ID NO:112, SEQ ID NO:119, SEQ ID NO:126, SEQ ID NO:133, or SEQ ID NO:140. In certain embodiments, the functional fragment as described herein comprises an amino acid that is at least 90% identical to the amino acid sequence of a fragment of a polypeptide comprising the amino acid sequence of SEQ ID NO:1, SEQ ID NO:2, SEQ ID NO:3, SEQ ID NO:4, SEQ ID NO:5, SEQ ID NO:6, SEQ ID NO:7, SEQ ID NO:8, SEQ ID NO:9, SEQ ID NO:10, SEQ ID NO:11, SEQ ID NO:12, SEQ ID NO:13, SEQ ID NO:14, SEQ ID NO:15, SEQ ID NO:16, SEQ ID NO:17, SEQ ID NO:18, SEQ ID NO:19, SEQ ID NO:20, SEQ ID NO:21, SEQ ID NO:22, SEQ ID NO:23, SEQ ID NO:24, SEQ ID NO:48, SEQ ID NO:52, SEQ ID NO:59, SEQ ID NO:66, SEQ ID NO:73, SEQ ID NO:80, SEQ ID NO:84, SEQ ID NO:91, SEQ ID NO:98, SEQ ID NO:105, SEQ ID NO:109, SEQ ID NO:113, SEQ ID NO:120, SEQ ID NO:127, SEQ ID NO:134, SEQ ID NO:49, SEQ ID NO:56, SEQ ID NO:63, SEQ ID NO:70, SEQ ID NO:77, SEQ ID NO:81, SEQ ID NO:88, SEQ ID NO:95, SEQ ID NO:102, SEQ ID NO: 106, SEQ ID NO:110, SEQ ID NO: 117, SEQ ID NO:124, SEQ ID NO:131, SEQ ID NO:138, SEQ ID NO:50, SEQ ID NO:57, SEQ ID NO:64, SEQ ID NO:71, SEQ ID NO:78, SEQ ID NO:82, SEQ ID NO:89, SEQ ID NO:96, SEQ ID NO:103, SEQ ID NO:107, SEQ ID NO:111, SEQ ID NO:118, SEQ ID NO:125, SEQ ID NO:132, SEQ ID NO:139, SEQ ID NO:51, SEQ ID NO:58, SEQ ID NO:65, SEQ ID NO:72, SEQ ID NO:79, SEQ ID NO:83, SEQ ID NO:90, SEQ ID NO:97, SEQ ID NO:104, SEQ ID NO:108, SEQ ID NO:112, SEQ ID NO:119, SEQ ID NO:126, SEQ ID NO:133, or SEQ ID NO:140. In certain embodiments, the functional fragment as described herein comprises an amino acid that is at least 95% identical to the amino acid sequence of a fragment of a polypeptide comprising the amino acid sequence of SEQ ID NO:1, SEQ ID NO:2, SEQ ID NO:3, SEQ ID NO:4, SEQ ID NO:5, SEQ ID NO:6, SEQ ID NO:7, SEQ ID NO:8, SEQ ID NO:9, SEQ ID NO:10, SEQ ID NO:11, SEQ ID NO:12, SEQ ID NO:13, SEQ ID NO:14, SEQ ID NO:15, SEQ ID NO:16, SEQ ID NO:17, SEQ ID NO:18, SEQ ID NO:19, SEQ ID NO:20, SEQ ID NO:21, SEQ ID NO:22, SEQ ID NO:23, SEQ ID NO:24, SEQ ID NO:48, SEQ ID NO:52, SEQ ID NO:59, SEQ ID NO:66, SEQ ID NO:73, SEQ ID NO:80, SEQ ID NO:84, SEQ ID NO:91, SEQ ID NO:98, SEQ ID NO:105, SEQ ID NO:109, SEQ ID NO:113, SEQ ID NO:120, SEQ ID NO:127, SEQ ID NO:134, SEQ ID NO:49, SEQ ID NO:56, SEQ ID NO:63, SEQ ID NO:70, SEQ ID NO:77, SEQ ID NO:81, SEQ ID NO:88, SEQ ID NO:95, SEQ ID NO:102, SEQ ID NO: 106, SEQ ID NO:110, SEQ ID NO: 117, SEQ ID NO:124, SEQ ID NO:131, SEQ ID NO:138, SEQ ID NO:50, SEQ ID NO:57, SEQ ID NO:64, SEQ ID NO:71, SEQ ID NO:78, SEQ ID NO:82, SEQ ID NO:89, SEQ ID NO:96, SEQ ID NO:103, SEQ ID NO:107, SEQ ID NO:111, SEQ ID NO:118, SEQ ID NO:125, SEQ ID NO:132, SEQ ID NO:139, SEQ ID NO:51, SEQ ID NO:58, SEQ ID NO:65, SEQ ID NO:72, SEQ ID NO:79, SEQ ID NO:83, SEQ ID NO:90, SEQ ID NO:97, SEQ ID NO:104, SEQ ID NO:108, SEQ ID NO:112, SEQ ID NO:119, SEQ ID NO:126, SEQ ID NO:133, or SEQ ID NO:140. In certain embodiments, the functional fragment as described herein comprises an amino acid that is at least 96% identical to the amino acid sequence of a fragment of a polypeptide comprising the amino acid sequence of SEQ ID NO:1, SEQ ID NO:2, SEQ ID NO:3, SEQ ID NO:4, SEQ ID NO:5, SEQ ID NO:6, SEQ ID NO:7, SEQ ID NO:8, SEQ ID NO:9, SEQ ID NO:10, SEQ ID NO:11, SEQ ID NO:12, SEQ ID NO:13, SEQ ID NO:14, SEQ ID NO:15, SEQ ID NO:16, SEQ ID NO:17, SEQ ID NO:18, SEQ ID NO:19, SEQ ID NO:20, SEQ ID NO:21, SEQ ID NO:22, SEQ ID NO:23, SEQ ID NO:24, SEQ ID NO:48, SEQ ID NO:52, SEQ ID NO:59, SEQ ID NO:66, SEQ ID NO:73, SEQ ID NO:80, SEQ ID NO:84, SEQ ID NO:91, SEQ ID NO:98, SEQ ID NO:105, SEQ ID NO:109, SEQ ID NO:113, SEQ ID NO:120, SEQ ID NO:127, SEQ ID NO:134, SEQ ID NO:49, SEQ ID NO:56, SEQ ID NO:63, SEQ ID NO:70, SEQ ID NO:77, SEQ ID NO:81, SEQ ID NO:88, SEQ ID NO:95, SEQ ID NO:102, SEQ ID NO: 106, SEQ ID NO:110, SEQ ID NO: 117, SEQ ID NO:124, SEQ ID NO:131, SEQ ID NO:138, SEQ ID NO:50, SEQ ID NO:57, SEQ ID NO:64, SEQ ID NO:71, SEQ ID NO:78, SEQ ID NO:82, SEQ ID NO:89, SEQ ID NO:96, SEQ ID NO:103, SEQ ID NO:107, SEQ ID NO:111, SEQ ID NO:118, SEQ ID NO:125, SEQ ID NO:132, SEQ ID NO:139, SEQ ID NO:51, SEQ ID NO:58, SEQ ID NO:65, SEQ ID NO:72, SEQ ID NO:79, SEQ ID NO:83, SEQ ID NO:90, SEQ ID NO:97, SEQ ID NO:104, SEQ ID NO:108, SEQ ID NO:112, SEQ ID NO:119, SEQ ID NO:126, SEQ ID NO:133, or SEQ ID NO:140. In certain embodiments, the functional fragment as described herein comprises an amino acid that is at least 97% identical to the amino acid sequence of a fragment of a polypeptide comprising the amino acid sequence of SEQ ID NO:1, SEQ ID NO:2, SEQ ID NO:3, SEQ ID NO:4, SEQ ID NO:5, SEQ ID NO:6, SEQ ID NO:7, SEQ ID NO:8, SEQ ID NO:9, SEQ ID NO:10, SEQ ID NO:11, SEQ ID NO:12, SEQ ID NO:13, SEQ ID NO:14, SEQ ID NO:15, SEQ ID NO:16, SEQ ID NO:17, SEQ ID NO:18, SEQ ID NO:19, SEQ ID NO:20, SEQ ID NO:21, SEQ ID NO:22, SEQ ID NO:23, SEQ ID NO:24, SEQ ID NO:48, SEQ ID NO:52, SEQ ID NO:59, SEQ ID NO:66, SEQ ID NO:73, SEQ ID NO:80, SEQ ID NO:84, SEQ ID NO:91, SEQ ID NO:98, SEQ ID NO:105, SEQ ID NO:109, SEQ ID NO:113, SEQ ID NO:120, SEQ ID NO:127, SEQ ID NO:134, SEQ ID NO:49, SEQ ID NO:56, SEQ ID NO:63, SEQ ID NO:70, SEQ ID NO:77, SEQ ID NO:81, SEQ ID NO:88, SEQ ID NO:95, SEQ ID NO:102, SEQ ID NO: 106, SEQ ID NO:110, SEQ ID NO: 117, SEQ ID NO:124, SEQ ID NO:131, SEQ ID NO:138, SEQ ID NO:50, SEQ ID NO:57, SEQ ID NO:64, SEQ ID NO:71, SEQ ID NO:78, SEQ ID NO:82, SEQ ID NO:89, SEQ ID NO:96, SEQ ID NO:103, SEQ ID NO:107, SEQ ID NO:111, SEQ ID NO:118, SEQ ID NO:125, SEQ ID NO:132, SEQ ID NO:139, SEQ ID NO:51, SEQ ID NO:58, SEQ ID NO:65, SEQ ID NO:72, SEQ ID NO:79, SEQ ID NO:83, SEQ ID NO:90, SEQ ID NO:97, SEQ ID NO:104, SEQ ID NO:108, SEQ ID NO:112, SEQ ID NO:119, SEQ ID NO:126, SEQ ID NO:133, or SEQ ID NO:140. In certain embodiments, the functional fragment as described herein comprises an amino acid that is at least 98% identical to the amino acid sequence of a fragment of a polypeptide comprising the amino acid sequence of SEQ ID NO:1, SEQ ID NO:2, SEQ ID NO:3, SEQ ID NO:4, SEQ ID NO:5, SEQ ID NO:6, SEQ ID NO:7, SEQ ID NO:8, SEQ ID NO:9, SEQ ID NO:10, SEQ ID NO:11, SEQ ID NO:12, SEQ ID NO:13, SEQ ID NO:14, SEQ ID NO:15, SEQ ID NO:16, SEQ ID NO:17, SEQ ID NO:18, SEQ ID NO:19, SEQ ID NO:20, SEQ ID NO:21, SEQ ID NO:22, SEQ ID NO:23, SEQ ID NO:24, SEQ ID NO:48, SEQ ID NO:52, SEQ ID NO:59, SEQ ID NO:66, SEQ ID NO:73, SEQ ID NO:80, SEQ ID NO:84, SEQ ID NO:91, SEQ ID NO:98, SEQ ID NO:105, SEQ ID NO:109, SEQ ID NO:113, SEQ ID NO:120, SEQ ID NO:127, SEQ ID NO:134, SEQ ID NO:49, SEQ ID NO:56, SEQ ID NO:63, SEQ ID NO:70, SEQ ID NO:77, SEQ ID NO:81, SEQ ID NO:88, SEQ ID NO:95, SEQ ID NO:102, SEQ ID NO: 106, SEQ ID NO:110, SEQ ID NO: 117, SEQ ID NO:124, SEQ ID NO:131, SEQ ID NO:138, SEQ ID NO:50, SEQ ID NO:57, SEQ ID NO:64, SEQ ID NO:71, SEQ ID NO:78, SEQ ID NO:82, SEQ ID NO:89, SEQ ID NO:96, SEQ ID NO:103, SEQ ID NO:107, SEQ ID NO:111, SEQ ID NO:118, SEQ ID NO:125, SEQ ID NO:132, SEQ ID NO:139, SEQ ID NO:51, SEQ ID NO:58, SEQ ID NO:65, SEQ ID NO:72, SEQ ID NO:79, SEQ ID NO:83, SEQ ID NO:90, SEQ ID NO:97, SEQ ID NO:104, SEQ ID NO:108, SEQ ID NO:112, SEQ ID NO:119, SEQ ID NO:126, SEQ ID NO:133, or SEQ ID NO:140. In certain embodiments, the functional fragment as described herein comprises an amino acid that is at least 99% identical to the amino acid sequence of a fragment of a polypeptide comprising the amino acid sequence of SEQ ID NO:1, SEQ ID NO:2, SEQ ID NO:3, SEQ ID NO:4, SEQ ID NO:5, SEQ ID NO:6, SEQ ID NO:7, SEQ ID NO:8, SEQ ID NO:9, SEQ ID NO:10, SEQ ID NO:11, SEQ ID NO:12, SEQ ID NO:13, SEQ ID NO:14, SEQ ID NO:15, SEQ ID NO:16, SEQ ID NO:17, SEQ ID NO:18, SEQ ID NO:19, SEQ ID NO:20, SEQ ID NO:21, SEQ ID NO:22, SEQ ID NO:23, SEQ ID NO:24, SEQ ID NO:48, SEQ ID NO:52, SEQ ID NO:59, SEQ ID NO:66, SEQ ID NO:73, SEQ ID NO:80, SEQ ID NO:84, SEQ ID NO:91, SEQ ID NO:98, SEQ ID NO:105, SEQ ID NO:109, SEQ ID NO:113, SEQ ID NO:120, SEQ ID NO:127, SEQ ID NO:134, SEQ ID NO:49, SEQ ID NO:56, SEQ ID NO:63, SEQ ID NO:70, SEQ ID NO:77, SEQ ID NO:81, SEQ ID NO:88, SEQ ID NO:95, SEQ ID NO:102, SEQ ID NO: 106, SEQ ID NO:110, SEQ ID NO: 117, SEQ ID NO:124, SEQ ID NO:131, SEQ ID NO:138, SEQ ID NO:50, SEQ ID NO:57, SEQ ID NO:64, SEQ ID NO:71, SEQ ID NO:78, SEQ ID NO:82, SEQ ID NO:89, SEQ ID NO:96, SEQ ID NO:103, SEQ ID NO:107, SEQ ID NO:111, SEQ ID NO:118, SEQ ID NO:125, SEQ ID NO:132, SEQ ID NO:139, SEQ ID NO:51, SEQ ID NO:58, SEQ ID NO:65, SEQ ID NO:72, SEQ ID NO:79, SEQ ID NO:83, SEQ ID NO:90, SEQ ID NO:97, SEQ ID NO:104, SEQ ID NO:108, SEQ ID NO:112, SEQ ID NO:119, SEQ ID NO:126, SEQ ID NO:133, or SEQ ID NO:140. In certain embodiments, the functional fragment as described herein comprises an amino acid that is 100% identical to the amino acid sequence of a fragment of a polypeptide comprising the amino acid sequence of SEQ ID NO:1, SEQ ID NO:2, SEQ ID NO:3, SEQ ID NO:4, SEQ ID NO:5, SEQ ID NO:6, SEQ ID NO:7, SEQ ID NO:8, SEQ ID NO:9, SEQ ID NO:10, SEQ ID NO: 11, SEQ ID NO:12, SEQ ID NO:13, SEQ ID NO:14, SEQ ID NO:15, SEQ ID NO:16, SEQ ID NO:17, SEQ ID NO:18, SEQ ID NO:19, SEQ ID NO:20, SEQ ID NO:21, SEQ ID NO:22, SEQ ID NO:23, SEQ ID NO:24, SEQ ID NO:48, SEQ ID NO:52, SEQ ID NO:59, SEQ ID NO:66, SEQ ID NO:73, SEQ ID NO:80, SEQ ID NO:84, SEQ ID NO:91, SEQ ID NO:98, SEQ ID NO:105, SEQ ID NO:109, SEQ ID NO:113, SEQ ID NO:120, SEQ ID NO:127, SEQ ID NO:134, SEQ ID NO:49, SEQ ID NO:56, SEQ ID NO:63, SEQ ID NO:70, SEQ ID NO:77, SEQ ID NO:81, SEQ ID NO:88, SEQ ID NO:95, SEQ ID NO:102, SEQ ID NO: 106, SEQ ID NO:110, SEQ ID NO: 117, SEQ ID NO:124, SEQ ID NO:131, SEQ ID NO:138, SEQ ID NO:50, SEQ ID NO:57, SEQ ID NO:64, SEQ ID NO:71, SEQ ID NO:78, SEQ ID NO:82, SEQ ID NO:89, SEQ ID NO:96, SEQ ID NO:103, SEQ ID NO:107, SEQ ID NO:111, SEQ ID NO:118, SEQ ID NO:125, SEQ ID NO:132, SEQ ID NO:139, SEQ ID NO:51, SEQ ID NO:58, SEQ ID NO:65, SEQ ID NO:72, SEQ ID NO:79, SEQ ID NO:83, SEQ ID NO:90, SEQ ID NO:97, SEQ ID NO:104, SEQ ID NO:108, SEQ ID NO:112, SEQ ID NO:119, SEQ ID NO:126, SEQ ID NO:133, or SEQ ID NO:140. In certain embodiments, the functional fragment as described herein comprises an amino acid that is 80% identical to the amino acid sequence of a fragment of a polypeptide comprising the amino acid sequence of SEQ ID NO:1, SEQ ID NO:2, SEQ ID NO:3, SEQ ID NO:4, SEQ ID NO:5, SEQ ID NO:6, SEQ ID NO:7, SEQ ID NO:8, SEQ ID NO:9, SEQ ID NO:10, SEQ ID NO: 11, SEQ ID NO:12, SEQ ID NO:13, SEQ ID NO:14, SEQ ID NO:15, SEQ ID NO:16, SEQ ID NO:17, SEQ ID NO:18, SEQ ID NO:19, SEQ ID NO:20, SEQ ID NO:21, SEQ ID NO:22, SEQ ID NO:23, SEQ ID NO:24, SEQ ID NO:48, SEQ ID NO:52, SEQ ID NO:59, SEQ ID NO:66, SEQ ID NO:73, SEQ ID NO:80, SEQ ID NO:84, SEQ ID NO:91, SEQ ID NO:98, SEQ ID NO:105, SEQ ID NO:109, SEQ ID NO:113, SEQ ID NO:120, SEQ ID NO:127, SEQ ID NO:134, SEQ ID NO:49, SEQ ID NO:56, SEQ ID NO:63, SEQ ID NO:70, SEQ ID NO:77, SEQ ID NO:81, SEQ ID NO:88, SEQ ID NO:95, SEQ ID NO:102, SEQ ID NO: 106, SEQ ID NO:110, SEQ ID NO: 117, SEQ ID NO:124, SEQ ID NO:131, SEQ ID NO:138, SEQ ID NO:50, SEQ ID NO:57, SEQ ID NO:64, SEQ ID NO:71, SEQ ID NO:78, SEQ ID NO:82, SEQ ID NO:89, SEQ ID NO:96, SEQ ID NO:103, SEQ ID NO:107, SEQ ID NO:111, SEQ ID NO:118, SEQ ID NO:125, SEQ ID NO:132, SEQ ID NO:139, SEQ ID NO:51, SEQ ID NO:58, SEQ ID NO:65, SEQ ID NO:72, SEQ ID NO:79, SEQ ID NO:83, SEQ ID NO:90, SEQ ID NO:97, SEQ ID NO:104, SEQ ID NO:108, SEQ ID NO:112, SEQ ID NO:119, SEQ ID NO:126, SEQ ID NO:133, or SEQ ID NO:140. In certain embodiments, the functional fragment as described herein comprises an amino acid that is 85% identical to the amino acid sequence of a fragment of a polypeptide comprising the amino acid sequence of SEQ ID NO:1, SEQ ID NO:2, SEQ ID NO:3, SEQ ID NO:4, SEQ ID NO:5, SEQ ID NO:6, SEQ ID NO:7, SEQ ID NO:8, SEQ ID NO:9, SEQ ID NO:10, SEQ ID NO: 11, SEQ ID NO:12, SEQ ID NO:13, SEQ ID NO:14, SEQ ID NO:15, SEQ ID NO:16, SEQ ID NO:17, SEQ ID NO:18, SEQ ID NO:19, SEQ ID NO:20, SEQ ID NO:21, SEQ ID NO:22, SEQ ID NO:23, SEQ ID NO:24, SEQ ID NO:48, SEQ ID NO:52, SEQ ID NO:59, SEQ ID NO:66, SEQ ID NO:73, SEQ ID NO:80, SEQ ID NO:84, SEQ ID NO:91, SEQ ID NO:98, SEQ ID NO:105, SEQ ID NO:109, SEQ ID NO:113, SEQ ID NO:120, SEQ ID NO:127, SEQ ID NO:134, SEQ ID NO:49, SEQ ID NO:56, SEQ ID NO:63, SEQ ID NO:70, SEQ ID NO:77, SEQ ID NO:81, SEQ ID NO:88, SEQ ID NO:95, SEQ ID NO:102, SEQ ID NO: 106, SEQ ID NO:110, SEQ ID NO: 117, SEQ ID NO:124, SEQ ID NO:131, SEQ ID NO:138, SEQ ID NO:50, SEQ ID NO:57, SEQ ID NO:64, SEQ ID NO:71, SEQ ID NO:78, SEQ ID NO:82, SEQ ID NO:89, SEQ ID NO:96, SEQ ID NO:103, SEQ ID NO:107, SEQ ID NO:111, SEQ ID NO:118, SEQ ID NO:125, SEQ ID NO:132, SEQ ID NO:139, SEQ ID NO:51, SEQ ID NO:58, SEQ ID NO:65, SEQ ID NO:72, SEQ ID NO:79, SEQ ID NO:83, SEQ ID NO:90, SEQ ID NO:97, SEQ ID NO:104, SEQ ID NO:108, SEQ ID NO:112, SEQ ID NO:119, SEQ ID NO:126, SEQ ID NO:133, or SEQ ID NO:140. In certain embodiments, the functional fragment as described herein comprises an amino acid that is 90% identical to the amino acid sequence of a fragment of a polypeptide comprising the amino acid sequence of SEQ ID NO:1, SEQ ID NO:2, SEQ ID NO:3, SEQ ID NO:4, SEQ ID NO:5, SEQ ID NO:6, SEQ ID NO:7, SEQ ID NO:8, SEQ ID NO:9, SEQ ID NO:10, SEQ ID NO: 11, SEQ ID NO:12, SEQ ID NO:13, SEQ ID NO:14, SEQ ID NO:15, SEQ ID NO:16, SEQ ID NO:17, SEQ ID NO:18, SEQ ID NO:19, SEQ ID NO:20, SEQ ID NO:21, SEQ ID NO:22, SEQ ID NO:23, SEQ ID NO:24, SEQ ID NO:48, SEQ ID NO:52, SEQ ID NO:59, SEQ ID NO:66, SEQ ID NO:73, SEQ ID NO:80, SEQ ID NO:84, SEQ ID NO:91, SEQ ID NO:98, SEQ ID NO:105, SEQ ID NO:109, SEQ ID NO:113, SEQ ID NO:120, SEQ ID NO:127, SEQ ID NO:134, SEQ ID NO:49, SEQ ID NO:56, SEQ ID NO:63, SEQ ID NO:70, SEQ ID NO:77, SEQ ID NO:81, SEQ ID NO:88, SEQ ID NO:95, SEQ ID NO:102, SEQ ID NO: 106, SEQ ID NO:110, SEQ ID NO: 117, SEQ ID NO:124, SEQ ID NO:131, SEQ ID NO:138, SEQ ID NO:50, SEQ ID NO:57, SEQ ID NO:64, SEQ ID NO:71, SEQ ID NO:78, SEQ ID NO:82, SEQ ID NO:89, SEQ ID NO:96, SEQ ID NO:103, SEQ ID NO:107, SEQ ID NO:111, SEQ ID NO:118, SEQ ID NO:125, SEQ ID NO:132, SEQ ID NO:139, SEQ ID NO:51, SEQ ID NO:58, SEQ ID NO:65, SEQ ID NO:72, SEQ ID NO:79, SEQ ID NO:83, SEQ ID NO:90, SEQ ID NO:97, SEQ ID NO:104, SEQ ID NO:108, SEQ ID NO:112, SEQ ID NO:119, SEQ ID NO:126, SEQ ID NO:133, or SEQ ID NO:140. In certain embodiments, the functional fragment as described herein comprises an amino acid that is 95% identical to the amino acid sequence of a fragment of a polypeptide comprising the amino acid sequence of SEQ ID NO:1, SEQ ID NO:2, SEQ ID NO:3, SEQ ID NO:4, SEQ ID NO:5, SEQ ID NO:6, SEQ ID NO:7, SEQ ID NO:8, SEQ ID NO:9, SEQ ID NO:10, SEQ ID NO: 11, SEQ ID NO:12, SEQ ID NO:13, SEQ ID NO:14, SEQ ID NO:15, SEQ ID NO:16, SEQ ID NO:17, SEQ ID NO:18, SEQ ID NO:19, SEQ ID NO:20, SEQ ID NO:21, SEQ ID NO:22, SEQ ID NO:23, SEQ ID NO:24, SEQ ID NO:48, SEQ ID NO:52, SEQ ID NO:59, SEQ ID NO:66, SEQ ID NO:73, SEQ ID NO:80, SEQ ID NO:84, SEQ ID NO:91, SEQ ID NO:98, SEQ ID NO:105, SEQ ID NO:109, SEQ ID NO:113, SEQ ID NO:120, SEQ ID NO:127, SEQ ID NO:134, SEQ ID NO:49, SEQ ID NO:56, SEQ ID NO:63, SEQ ID NO:70, SEQ ID NO:77, SEQ ID NO:81, SEQ ID NO:88, SEQ ID NO:95, SEQ ID NO:102, SEQ ID NO: 106, SEQ ID NO:110, SEQ ID NO: 117, SEQ ID NO:124, SEQ ID NO:131, SEQ ID NO:138, SEQ ID NO:50, SEQ ID NO:57, SEQ ID NO:64, SEQ ID NO:71, SEQ ID NO:78, SEQ ID NO:82, SEQ ID NO:89, SEQ ID NO:96, SEQ ID NO:103, SEQ ID NO:107, SEQ ID NO:111, SEQ ID NO:118, SEQ ID NO:125, SEQ ID NO:132, SEQ ID NO:139, SEQ ID NO:51, SEQ ID NO:58, SEQ ID NO:65, SEQ ID NO:72, SEQ ID NO:79, SEQ ID NO:83, SEQ ID NO:90, SEQ ID NO:97, SEQ ID NO:104, SEQ ID NO:108, SEQ ID NO:112, SEQ ID NO:119, SEQ ID NO:126, SEQ ID NO:133, or SEQ ID NO:140. In certain embodiments, the functional fragment as described herein comprises an amino acid that is 96% identical to the amino acid sequence of a fragment of a polypeptide comprising the amino acid sequence of SEQ ID NO:1, SEQ ID NO:2, SEQ ID NO:3, SEQ ID NO:4, SEQ ID NO:5, SEQ ID NO:6, SEQ ID NO:7, SEQ ID NO:8, SEQ ID NO:9, SEQ ID NO:10, SEQ ID NO: 11, SEQ ID NO:12, SEQ ID NO:13, SEQ ID NO:14, SEQ ID NO:15, SEQ ID NO:16, SEQ ID NO:17, SEQ ID NO:18, SEQ ID NO:19, SEQ ID NO:20, SEQ ID NO:21, SEQ ID NO:22, SEQ ID NO:23, SEQ ID NO:24, SEQ ID NO:48, SEQ ID NO:52, SEQ ID NO:59, SEQ ID NO:66, SEQ ID NO:73, SEQ ID NO:80, SEQ ID NO:84, SEQ ID NO:91, SEQ ID NO:98, SEQ ID NO:105, SEQ ID NO:109, SEQ ID NO:113, SEQ ID NO:120, SEQ ID NO:127, SEQ ID NO:134, SEQ ID NO:49, SEQ ID NO:56, SEQ ID NO:63, SEQ ID NO:70, SEQ ID NO:77, SEQ ID NO:81, SEQ ID NO:88, SEQ ID NO:95, SEQ ID NO:102, SEQ ID NO: 106, SEQ ID NO:110, SEQ ID NO: 117, SEQ ID NO:124, SEQ ID NO:131, SEQ ID NO:138, SEQ ID NO:50, SEQ ID NO:57, SEQ ID NO:64, SEQ ID NO:71, SEQ ID NO:78, SEQ ID NO:82, SEQ ID NO:89, SEQ ID NO:96, SEQ ID NO:103, SEQ ID NO:107, SEQ ID NO:111, SEQ ID NO:118, SEQ ID NO:125, SEQ ID NO:132, SEQ ID NO:139, SEQ ID NO:51, SEQ ID NO:58, SEQ ID NO:65, SEQ ID NO:72, SEQ ID NO:79, SEQ ID NO:83, SEQ ID NO:90, SEQ ID NO:97, SEQ ID NO:104, SEQ ID NO:108, SEQ ID NO:112, SEQ ID NO:119, SEQ ID NO:126, SEQ ID NO:133, or SEQ ID NO:140. In certain embodiments, the functional fragment as described herein comprises an amino acid that is 97% identical to the amino acid sequence of a fragment of a polypeptide comprising the amino acid sequence of SEQ ID NO:1, SEQ ID NO:2, SEQ ID NO:3, SEQ ID NO:4, SEQ ID NO:5, SEQ ID NO:6, SEQ ID NO:7, SEQ ID NO:8, SEQ ID NO:9, SEQ ID NO:10, SEQ ID NO: 11, SEQ ID NO:12, SEQ ID NO:13, SEQ ID NO:14, SEQ ID NO:15, SEQ ID NO:16, SEQ ID NO:17, SEQ ID NO:18, SEQ ID NO:19, SEQ ID NO:20, SEQ ID NO:21, SEQ ID NO:22, SEQ ID NO:23, SEQ ID NO:24, SEQ ID NO:48, SEQ ID NO:52, SEQ ID NO:59, SEQ ID NO:66, SEQ ID NO:73, SEQ ID NO:80, SEQ ID NO:84, SEQ ID NO:91, SEQ ID NO:98, SEQ ID NO:105, SEQ ID NO:109, SEQ ID NO:113, SEQ ID NO:120, SEQ ID NO:127, SEQ ID NO:134, SEQ ID NO:49, SEQ ID NO:56, SEQ ID NO:63, SEQ ID NO:70, SEQ ID NO:77, SEQ ID NO:81, SEQ ID NO:88, SEQ ID NO:95, SEQ ID NO:102, SEQ ID NO: 106, SEQ ID NO:110, SEQ ID NO: 117, SEQ ID NO:124, SEQ ID NO:131, SEQ ID NO:138, SEQ ID NO:50, SEQ ID NO:57, SEQ ID NO:64, SEQ ID NO:71, SEQ ID NO:78, SEQ ID NO:82, SEQ ID NO:89, SEQ ID NO:96, SEQ ID NO:103, SEQ ID NO:107, SEQ ID NO:111, SEQ ID NO:118, SEQ ID NO:125, SEQ ID NO:132, SEQ ID NO:139, SEQ ID NO:51, SEQ ID NO:58, SEQ ID NO:65, SEQ ID NO:72, SEQ ID NO:79, SEQ ID NO:83, SEQ ID NO:90, SEQ ID NO:97, SEQ ID NO:104, SEQ ID NO:108, SEQ ID NO:112, SEQ ID NO:119, SEQ ID NO:126, SEQ ID NO:133, or SEQ ID NO:140. In certain embodiments, the functional fragment as described herein comprises an amino acid that is 98% identical to the amino acid sequence of a fragment of a polypeptide comprising the amino acid sequence of SEQ ID NO:1, SEQ ID NO:2, SEQ ID NO:3, SEQ ID NO:4, SEQ ID NO:5, SEQ ID NO:6, SEQ ID NO:7, SEQ ID NO:8, SEQ ID NO:9, SEQ ID NO:10, SEQ ID NO: 11, SEQ ID NO:12, SEQ ID NO:13, SEQ ID NO:14, SEQ ID NO:15, SEQ ID NO:16, SEQ ID NO:17, SEQ ID NO:18, SEQ ID NO:19, SEQ ID NO:20, SEQ ID NO:21, SEQ ID NO:22, SEQ ID NO:23, SEQ ID NO:24, SEQ ID NO:48, SEQ ID NO:52, SEQ ID NO:59, SEQ ID NO:66, SEQ ID NO:73, SEQ ID NO:80, SEQ ID NO:84, SEQ ID NO:91, SEQ ID NO:98, SEQ ID NO:105, SEQ ID NO:109, SEQ ID NO:113, SEQ ID NO:120, SEQ ID NO:127, SEQ ID NO:134, SEQ ID NO:49, SEQ ID NO:56, SEQ ID NO:63, SEQ ID NO:70, SEQ ID NO:77, SEQ ID NO:81, SEQ ID NO:88, SEQ ID NO:95, SEQ ID NO:102, SEQ ID NO: 106, SEQ ID NO:110, SEQ ID NO: 117, SEQ ID NO:124, SEQ ID NO:131, SEQ ID NO:138, SEQ ID NO:50, SEQ ID NO:57, SEQ ID NO:64, SEQ ID NO:71, SEQ ID NO:78, SEQ ID NO:82, SEQ ID NO:89, SEQ ID NO:96, SEQ ID NO:103, SEQ ID NO:107, SEQ ID NO:111, SEQ ID NO:118, SEQ ID NO:125, SEQ ID NO:132, SEQ ID NO:139, SEQ ID NO:51, SEQ ID NO:58, SEQ ID NO:65, SEQ ID NO:72, SEQ ID NO:79, SEQ ID NO:83, SEQ ID NO:90, SEQ ID NO:97, SEQ ID NO:104, SEQ ID NO:108, SEQ ID NO:112, SEQ ID NO:119, SEQ ID NO:126, SEQ ID NO:133, or SEQ ID NO:140. In certain embodiments, the functional fragment as described herein comprises an amino acid that is 99% identical to the amino acid sequence of a fragment of a polypeptide comprising the amino acid sequence of SEQ ID NO:1, SEQ ID NO:2, SEQ ID NO:3, SEQ ID NO:4, SEQ ID NO:5, SEQ ID NO:6, SEQ ID NO:7, SEQ ID NO:8, SEQ ID NO:9, SEQ ID NO:10, SEQ ID NO: 11, SEQ ID NO:12, SEQ ID NO:13, SEQ ID NO:14, SEQ ID NO:15, SEQ ID NO:16, SEQ ID NO:17, SEQ ID NO:18, SEQ ID NO:19, SEQ ID NO:20, SEQ ID NO:21, SEQ ID NO:22, SEQ ID NO:23, SEQ ID NO:24, SEQ ID NO:48, SEQ ID NO:52, SEQ ID NO:59, SEQ ID NO:66, SEQ ID NO:73, SEQ ID NO:80, SEQ ID NO:84, SEQ ID NO:91, SEQ ID NO:98, SEQ ID NO:105, SEQ ID NO:109, SEQ ID NO:113, SEQ ID NO:120, SEQ ID NO:127, SEQ ID NO:134, SEQ ID NO:49, SEQ ID NO:56, SEQ ID NO:63, SEQ ID NO:70, SEQ ID NO:77, SEQ ID NO:81, SEQ ID NO:88, SEQ ID NO:95, SEQ ID NO:102, SEQ ID NO: 106, SEQ ID NO:110, SEQ ID NO: 117, SEQ ID NO:124, SEQ ID NO:131, SEQ ID NO:138, SEQ ID NO:50, SEQ ID NO:57, SEQ ID NO:64, SEQ ID NO:71, SEQ ID NO:78, SEQ ID NO:82, SEQ ID NO:89, SEQ ID NO:96, SEQ ID NO:103, SEQ ID NO:107, SEQ ID NO:111, SEQ ID NO:118, SEQ ID NO:125, SEQ ID NO:132, SEQ ID NO:139, SEQ ID NO:51, SEQ ID NO:58, SEQ ID NO:65, SEQ ID NO:72, SEQ ID NO:79, SEQ ID NO:83, SEQ ID NO:90, SEQ ID NO:97, SEQ ID NO:104, SEQ ID NO:108, SEQ ID NO:112, SEQ ID NO:119, SEQ ID NO:126, SEQ ID NO:133, or SEQ ID NO:140.

### 5.3 Heterologous Non-Arenaviral Polypeptide

[0106] As described herein, in certain embodiments, the heterologous non-arenaviral polypeptide may be not of arenavirus origin. In some embodiments, any native signal peptide of a heterologous non-arenaviral polypeptide (e.g., a first heterologous non-arenaviral polypeptide) is truncated or deleted. In some embodiments, any native signal peptide of a heterologous non-arenaviral polypeptide (e.g., a second heterologous non-arenaviral polypeptide) is retained. In some embodiments, a heterologous non-arenaviral polypeptide (e.g., a first heterologous non-arenaviral polypeptide) is fused to a buffer peptide, which in turn is fused to the GP signal peptide (or a functional fragment thereof or a polypeptide comprising such a functional fragment or the GP signal peptide). In some embodiments, a heterologous non-arenaviral polypeptide (e.g., a first heterologous non-arenaviral polypeptide) is fused to the C-terminus of a buffer peptide.

[0107] In certain embodiments, the nucleotide sequence provided herein (see Section 5.5) comprises a first open reading frame (ORF) that comprises a nucleotide sequence encoding a functional fragment of a first polypeptide selected from the group consisting of arenavirus GP, NP, Z and L, and a second ORF that comprises a nucleotide sequence encoding the heterologous non-arenaviral polypeptide provided herein. In certain embodiments, the nucleotide sequence provided herein comprises an open reading frame (ORF), and the ORF comprises a nucleotide sequence encoding a functional fragment of a first polypeptide selected from the group consisting of arenavirus GP, NP, Z and L that are not from Lassa virus, and a heterologous non-arenaviral polypeptide. In certain embodiments, the arenavirus particle described herein comprises a genome encoding a heterologous polypeptide of arenavirus origin, but derived from a type of arenavirus that is different from the type of arenavirus from which the arenavirus particle comprises GP, NP, Z as well as L. In an exemplary embodiment, the heterologous polypeptide is from Lassa virus, whereas the arenavirus particle comprises the GP, NP, Z as well as L of LCMV or Pichinde virus.

[0108] In certain embodiments, the arenavirus particle provided herein is engineered such that an arenaviral ORF is separated over two or more mRNA transcripts (see Section 5.6). In certain embodiments, one of the mRNA transcripts further comprises a nucleotide sequence encoding a heterologous non-arenaviral polypeptide. In certain embodiments, one of the mRNA transcripts further comprises a nucleotide sequence encoding heterologous polypeptide of arenavirus origin, but derived from a type of arenavirus that is different from the type of arenavirus from which the arenavirus particle comprises GP, NP, Z as well as L. In an exemplary embodiment, the heterologous polypeptide is from Lassa virus, whereas the arenavirus particle comprises the GP, NP, Z as well as L of LCMV or Pichinde virus.

[0109] In certain embodiments, the arenavirus genomic or antigenomic segment provided herein (see Section 5.7) is engineered such that the viral transcription thereof results in a first mRNA transcript comprising a nucleotide sequence encoding a functional fragment of a first polypeptide selected from the group consisting of arenavirus GP, NP, Z and L and a second mRNA transcript comprising a nucleotide sequence encoding a heterologous non-arenaviral polypeptide. In certain embodiments, the arenavirus genomic or antigenomic segment provided herein is engineered such that the viral transcription thereof results in an mRNA transcript encoding a functional fragment of a first polypeptide selected from the group consisting of arenavirus GP, NP, Z and L, and a heterologous non-arenaviral polypeptide or a second polypeptide. In certain embodiments, the arenavirus genomic or antigenomic segment provided herein is engineered such that the viral transcription thereof results in an mRNA transcript encoding a functional fragment of a first polypeptide selected from the group consisting of arenavirus GP, NP, Z and L, and a heterologous polypeptide of arenavirus origin, but derived from a type of arenavirus that is different from the type of arenavirus from which the arenavirus genome comprises GP, NP, Z as well as L. In an exemplary embodiment, the heterologous polypeptide is from Lassa virus, whereas the arenavirus genome comprises the GP, NP, Z as well as L of LCMV or Pichinde virus.

[0110] In certain embodiments, the heterologous non-arenaviral polypeptide is about, at most about, or at least about 5, 8, 10, 12, 15, 18, 20, 22, 25, 28, 30, 32, 35, 38, 40, 42, 45, 48, 50, 52, 55, 58, 60, 65, 70, 75, 80, 85, 90, 95, 100, 150, 200, 250, 300, 350, 400, 450, 500, 550, 600, 650, 700, 750, 800, 850, 900, 950, 1000, or more than 1000 amino acids in length. In certain embodiments, the heterologous non-arenaviral polypeptide is about, at least about, or at most about 5 to 10 amino acids in length, 10 to 25 amino acids in length, 25 to 50 amino acids in length, 50 to 100 amino acids in length, 100 to 150 amino acids in length, 150 to 200 amino acids in length, 200 to 250 amino acids in length, 250 to 300 amino acids in length, 300 to 400 amino acids in length, 300 to 500 amino acids in length, 350 to 600 amino acids in length, 400 to 500 amino acids in length, 500 to 750 amino acids in length, 750 to 1000 amino acids in length, 1000 to 1250 amino acids in length, 1250 to 1500 amino acids in length, 1500 to 1750 amino acids in length, 1750 to 2000 amino acids in length, 2000 to 2500 amino acids in length, or more than 2500 or more amino acids in length. In certain embodiments, the heterologous non-arenaviral polypeptide does not exceed 500 amino acids in length. In certain embodiments, the heterologous non-arenaviral polypeptide does not exceed 750 amino acids in length. In certain embodiments, the heterologous non-arenaviral polypeptide does not exceed 1000 amino acids in length. In certain embodiments, the heterologous non-arenaviral polypeptide does not exceed 2500 amino acids in length.

[0111] In certain embodiments, the heterologous non-arenaviral polypeptide consists of about, at least about, or at most about 5, 8, 10, 12, 15, 18, 20, 22, 25, 28, 30, 32, 35, 38, 40, 42, 45, 48, 50, 52, 55, 58, 60, 65, 70, 75, 80, 85, 90, 95, 100, 150, 200, 250, 300, 350, 400, 450, 500, 550, 600, 650, 700, 750, 800, 850, 900, 950, or 1000 amino-acid residues. In certain embodiments, the heterologous non-arenaviral polypeptide may consist of about, at least about, or at most about 58 amino-acid residues. In certain embodiments, the heterologous non-arenaviral polypeptide may consist of about, at least about, or at most about 193 amino-acid residues. In certain embodiments, the heterologous non-arenaviral polypeptide may consist of about, at least about, or at most about 200 amino-acid residues. In certain embodiments, the heterologous non-arenaviral polypeptide may consist of about, at least about, or at most about 480 amino-acid residues. In certain embodiments, the heterologous non-arenaviral polypeptide may consist of about, at least about, or at most about 450 amino-acid residues. In certain embodiments, the heterologous non-arenaviral polypeptide may consist of about, at least about, or at most about 500 amino-acid residues. In certain embodiments, the heterologous non-arenaviral polypeptide may consist of about, at least about, or at most about 350 amino-acid residues. In certain embodiments, the heterologous non-arenaviral polypeptide may consist of about, at least about, or at most about 400 amino-acid residues. In certain embodiments, the heterologous non-arenaviral polypeptide may consist of about, at least about, or at most about 550 amino-acid residues. In certain embodiments, the heterologous non-arenaviral polypeptide may consist of about, at least about, or at most about 600 amino-acid residues. In certain embodiments, the heterologous non-arenaviral polypeptide may consist of about, at least about, or at most about 15 amino-acid residues. In certain embodiments, the heterologous non-arenaviral polypeptide may consist of about, at least about, or at most about 20 amino-acid residues. In certain embodiments, the heterologous non-arenaviral polypeptide may consist of about, at least about, or at most about 1 to 20 amino-acid residues. In certain embodiments, the heterologous non-arenaviral polypeptide may consist of about, at least about, or at most about 200 to 600 amino-acid residues. In certain embodiments, the coding sequence of the heterologous non-arenaviral polypeptide (e.g., the first heterologous non-arenaviral polypeptide) starts at about amino acid 60 or more than about 60 amino acids downstream of the methionine start codon of the GP signal peptide.

[0112] In certain embodiments, the heterologous non-arenaviral polypeptide is a reporter protein (see Section 5.3.1). In certain embodiments, the heterologous non-arenaviral polypeptide is a heterologous non-arenaviral signal peptide (see Section 5.3.2). In certain embodiments, the heterologous non-arenaviral polypeptide is an antigen (see Section 5.3.3).

### 5.3.1 Reporter Protein

[0113] In certain embodiments, the heterologous non-arenaviral polypeptide described herein is a reporter protein or a fluorescent protein. In certain embodiments, the reporter protein is a fluorescent protein. In certain embodiments, the reporter protein is green fluorescent protein (GFP). GFP emits bright green light when exposed to UV or blue like. In other embodiments, the reporter protein is a red fluorescent protein (RFP). In an exemplary embodiments, the report protein is TOM.

[0114] Reporter protein and genes would be readily recognized by one of skill in the art. Non-limiting examples of reporter proteins include various enzymes, such as, but not to 0-galactosidase, chloramphenicol acetyltransferase, neomycin phosphotransferase, luciferase or RFP.

[0115] In certain embodiments, the reporter protein is capable of expression at the same time as the antigen described herein. Ideally, expression is visible in normal light or other wavelengths of light. In certain embodiments, the intensity of the effect created by the reporter protein can be used to directly measure and monitor the arenavirus particle or tri-segmented arenavirus particle.

### 5.3.2 Heterologous Non-Arenaviral Signal Peptide

[0116] In certain embodiments, the heterologous non-arenaviral polypeptide described herein is a heterologous non-arenaviral signal peptide. In certain embodiments, the heterologous non-arenaviral signal peptide is a signal peptide of a glycoprotein. In certain embodiments, the heterologous non-arenaviral signal peptide is from a virus family selected from the group consisting of adenoviridae (e.g., mastadenovirus and aviadenovirus), herpesviridae (e.g., herpes simplex virus 1, herpes simplex virus 2, herpes simplex virus 5, herpes simplex virus 6, Epstein-Barr virus, HHV6-HHV8, cytomegalovirus, and varicella zoster virus), leviviridae (e.g., levivirus, enterobacteria phase MS2, allolevirus), orthomyxoviridae (e.g., influenzavirus A, influenzavirus B, influenzavirus C), parvoviridae (e.g., Parvovirus B19), filoviridae (e.g., Ebola virus, Marburg virus), hantaviridae, poxviridae (e.g., chordopoxviridae, parapoxvirus, avipoxvirus, capripoxvirus, leporiipoxvirus, suipoxvirus, molluscipoxvirus, and entomopoxyirinae), polyomaviridae, papillomaviridae (e.g., human papillomavirus), paramyxoviridae (e.g., paramyxovirus, parainfluenza virus 1, mobillivirus (e.g., measles virus), rubulavirus (e.g., mumps virus)), pneumoviridae (e.g., pneumovirus, human respiratory syncytial virus and metapneumovirus (e.g., avian pneumovirus and human metapneumovirus)), picornaviridae (e.g., enterovirus, rhinovirus, hepatovirus (e.g., human hepatitis A virus), cardiovirus, and apthovirus), reoviridae (e.g., orthoreovirus, orbivirus, rotavirus, cypovirus, fijivirus, phytoreovirus, and oryzavirus), retroviridae (e.g., mammalian type B retroviruses, mammalian type C retroviruses, avian type C retroviruses, type D retrovirus group, BLV-HTLV retroviruses, lentivirus (e.g. human immunodeficiency virus (HIV) 1 and HIV-2 (e.g., HIV gp160)), spumavirus), flaviviridae (e.g., hepatitis C virus, dengue virus, West Nile virus), hepadnaviridae (e.g., hepatitis B virus), togaviridae (e.g., alphavirus (e.g., sindbis virus) and rubivirus (e.g., rubella virus)), rhabdoviridae (e.g., vesiculovirus, lyssavirus, ephemerovirus, cytorhabdovirus, and necleorhabdovirus), arenaviridae (e.g., arenavirus, lymphocytic choriomeningitis virus, Ippy virus, mobala virus, mopeia virus, amapari virus, flexal virus, guanarito virus, junin virus, latino virus, machupo virus, oliveros virus, parana virus, pichinde virus, pirital virus, sabia virus, tacaribe virus, tamiami virus, bear canyon virus, whitewater arroyo virus, allpahuayo virus (ALLV), and lassa virus), and coronaviridae (e.g., coronavirus and torovirus). In certain embodiments, the heterologous non-arenaviral signal peptide is the signal peptide of the vesicular stomatitis virus serotype Indiana glycoprotein.

### 5.3.3 Antigen

[0117] In certain embodiments, the heterologous non-arenaviral polypeptide is an antigen. In certain embodiments, the antigen is derived from an infectious organism, tumor, or allergen. In one embodiment, the antigen is of an infectious pathogen or associated with any disease that is capable of eliciting an immune response. In certain embodiments, the heterologous non-arenaviral polypeptide is an antigen derived from a virus, a bacterium, a fungus, a parasite, or can be expressed in a tumor or tumor associated disease (i.e., cancer), an autoimmune disease, a degenerative disease, an inherited disease, substance dependency, obesity, or an allergic disease.

[0118] In certain embodiments, the heterologous non-arenaviral polypeptide is a viral antigen. Non-limiting examples of viral antigens include antigens from adenoviridae (e.g., mastadenovirus and aviadenovirus), herpesviridae (e.g., herpes simplex virus 1, herpes simplex virus 2, herpes simplex virus 5, herpes simplex virus 6, Epstein-Barr virus, HHV6-HHV8, cytomegalovirus, and varicella zoster virus), leviviridae (e.g., levivirus, enterobacteria phase MS2, allolevirus), orthomyxoviridae (e.g., influenzavirus A, influenzavirus B, influenzavirus C), parvoviridae (e.g., Parvovirus B19), filoviridae (e.g., Ebola virus, Marburg virus), hantaviridae, poxviridae (e.g., chordopoxviridae, parapoxvirus, avipoxvirus, capripoxvirus, leporiipoxvirus, suipoxvirus, molluscipoxvirus, and entomopoxyirinae), polyomaviridae, papillomaviridae (e.g., human papillomavirus), paramyxoviridae (e.g., paramyxovirus, parainfluenza virus 1, mobillivirus (e.g., measles virus), rubulavirus (e.g., mumps virus)), pneumoviridae (e.g., pneumovirus, human respiratory syncytial virus and metapneumovirus (e.g., avian pneumovirus and human metapneumovirus)), picornaviridae (e.g., enterovirus, rhinovirus, hepatovirus (e.g., human hepatitis A virus), cardiovirus, and apthovirus), reoviridae (e.g., orthoreovirus, orbivirus, rotavirus, cypovirus, fijivirus, phytoreovirus, and oryzavirus), retroviridae (e.g., mammalian type B retroviruses, mammalian type C retroviruses, avian type C retroviruses, type D retrovirus group, BLV-HTLV retroviruses, lentivirus (e.g. human immunodeficiency virus (HIV) 1 and HIV-2 (e.g., HIV gp160)), spumavirus), flaviviridae (e.g., hepatitis C virus, dengue virus, West Nile virus), hepadnaviridae (e.g., hepatitis B virus), togaviridae (e.g., alphavirus (e.g., sindbis virus) and rubivirus (e.g., rubella virus)), rhabdoviridae (e.g., vesiculovirus, lyssavirus, ephemerovirus, cytorhabdovirus, and necleorhabdovirus), arenaviridae (e.g., arenavirus, lymphocytic choriomeningitis virus, Ippy virus, mobala virus, mopeia virus, amapari virus, flexal virus, guanarito virus, junin virus, latino virus, machupo virus, oliveros virus, parana virus, pichinde virus, pirital virus, sabia virus, tacaribe virus, tamiami virus, bear canyon virus, whitewater arroyo virus, allpahuayo virus (ALLV), and lassa virus), and coronaviridae (e.g., coronavirus and torovirus). In certain embodiments, the arenavirus particle described herein comprises a genome encoding an antigen from a mammarenavirus (e.g., Allpahuayo virus, Alxa virus, Junin virus, Bear Canyon virus, Sabia virus, Pichinde virus, Chapare virus, Lijiang virus, Cupixi virus, Flexal virus, Gairo virus, Guanarito virus, Ippy virus, Lassa virus, Latino virus, Loei River virus, Lujo virus, Luna virus, Luli virus, Lunk virus, lymphocytic choriomeningitis virus, Machupo virus, Mariental virus, Merino Walk virus, Mobala virus, Mopeia virus, Morogoro virus, Okahandja virus, Oliveros virus, Parana virus, Pirital virus, Apore virus, Ryukyu virus, Amapari virus, Solwezi virus, souris virus, Tacaribe virus, Tamiami virus, Wenzhou virus, Whitewater Arroyo virus, Big Brushy Tank virus, Catarina virus, Skinner Tank virus, Tonto Creek virus, or Xapuri virus), wherein the mammarenavirus is different from the species of arenavirus from which the arenavirus particle comprises GP, NP, Z as well as L. In a specific embodiment the viral antigen, is HIV gp120, gp41, HIV Nef, RSV F glycoprotein, RSV G glycoprotein, HTLV tax, herpes simplex virus glycoprotein (e.g., gB, gC, gD, and gE) or hepatitis B surface antigen, hepatitis C virus E protein or coronavirus spike protein. In one embodiment, the viral antigen is not an HIV antigen.

[0119] In other embodiments, the heterologous non-arenaviral polypeptide is a bacterial antigen (e.g., bacterial coat protein). Non-limiting examples of bacterial antigens include antigens from a bacteria family selected from the group consisting of the Aquaspirillum family, Azospirillum family, Azotobacteraceae family, Bacteroidaceae family, Bartonella species, Bdellovibrio family, Campylobacter species, Chlamydia species (e.g., Chlamydia pneumoniae), clostridium, Enterobacteriaceae family (e.g., Citrobacter species, Edwardsiella, Enterobacter aerogenes, Envinia species, Escherichia coli, Hafnia species, Klebsiella species, Morganella species, Proteus vulgaris, Providencia, Salmonella species, Serratia marcescens, and Shigella flexneri), Gardinella family, Haemophilus influenzae, Halobacteriaceae family, Helicobacter family, Legionallaceae family, Listeria species, Methylococcaceae family, mycobacteria (e.g., Mycobacterium tuberculosis), Neisseriaceae family, Oceanospirillum family, Pasteurellaceae family, Pneumococcus species, Pseudomonas species, Rhizobiaceae family, Spirillum family, Spirosomaceae family, Staphylococcus (e.g., methicillin resistant Staphylococcus aureus and Staphylococcus pyrogenes), Streptococcus (e.g., Streptococcus enteritidis, Streptococcus fasciae, and Streptococcus pneumoniae), Vampirovibr Helicobacter family, Yersinia family, Bacillus antracis and Vampirovibrio family.

[0120] In other embodiments, the heterologous non-arenaviral polypeptide is a parasitic antigen (e.g., a protozoan antigen). Non-limiting examples of parasite antigens include antigens from a parasite such as an amoeba, a malarial parasite, Plasmodium, Trypanosoma cruzi.

[0121] In yet other embodiments, the heterologous non-arenaviral polypeptide is a fungal antigen. Non-limiting examples of fungal antigens include antigens from fungus of Absidia species (e.g., Absidia corymbifera and Absidia ramosa), Aspergillus species, (e.g., Aspergillus flavus, Aspergillus fumigatus, Aspergillus nidulans, Aspergillus niger, and Aspergillus terreus), Basidiobolus ranarum, Blastomyces dermatitidis, Candida species (e.g., Candida albicans, Candida glabrata, Candida kern, Candida krusei, Candida parapsilosis, Candida pseudotropicalis, Candida quillermondii, Candida rugosa, Candida stellatoidea, and Candida tropicalis), Coccidioides immitis, Conidiobolus species, Cryptococcus neoforms, Cunninghamella species, dermatophytes, Histoplasma capsulatum, Microsporum gypseum, Mucor pusillus, Paracoccidioides brasiliensis, Pseudallescheria boydii, Rhinosporidium seeberi, Pneumocystis carinii, Rhizopus species (e.g., Rhizopus arrhizus, Rhizopus oryzae, and Rhizopus microsporus), Saccharomyces species, Sporothrix schenckii, zygomycetes, and classes such as Zygomycetes, Ascomycetes, the Basidiomycetes, Deuteromycetes, and Oomycetes.

[0122] In some embodiments, the heterologous non-arenaviral polypeptide is a tumor neoantigen. A “neoantigen,” used herein, means an antigen that arises by mutation in a tumor cell and such an antigen is not generally expressed in normal cells or tissue. Without being bound by theory, because healthy tissues generally do not possess these antigens, neoantigens represent a preferred target. Additionally, without being bound by theory, in the context of the present invention, since the T cells that recognize the neoantigen may not have undergone negative thymic selection or functionally impacted by peripheral tolerance mechanisms, such cells can have high functional avidity to the antigen and mount a strong immune response against tumors, while lacking the risk to induce destruction of normal tissue and autoimmune damage. In certain embodiments, the neoantigen is an MHC class I-restricted neoantigen. In certain embodiments, the neoantigen is an MHC class II-restricted neoantigen. In certain embodiments, a mutation in a tumor cell of the patient results in a novel protein that produces the neoantigen. In certain embodiments, the heterologous non-arenaviral polypeptide is a tumor neo-epitope. In certain embodiments, the neo-epitope is an MHC class I-restricted neo-epitope. In certain embodiments, the neo-epitope is an MHC class II-restricted neo-epitope.

[0123] In some embodiments, the heterologous non-arenaviral polypeptide is a tumor antigen or tumor associated antigen. In some embodiments, the tumor antigen or tumor associated antigen includes antigens from tumor associated diseases including acute lymphoblastic leukemia, acute myeloid leukemia, adrenocortical carcinoma, childhood adrenocortical carcinoma, AIDS-Related Cancers, Kaposi Sarcoma, anal cancer, appendix cancer, astrocytomas, atypical teratoid/rhabdoid tumor, basal-cell carcinoma, bile duct cancer, extrahepatic (see cholangiocarcinoma), bladder cancer, bone osteosarcoma/malignant fibrous histiocytoma, brainstem glioma, brain cancer, brain tumor, cerebellar astrocytoma, cerebral astrocytoma/malignant glioma brain tumor, ependymoma, medulloblastoma, supratentorial primitive neuroectodermal tumors, visual pathway and hypothalamic glioma, breast cancer, bronchial adenomas/carcinoids, burkitt's lymphoma, carcinoid tumor, carcinoid gastrointestinal tumor, carcinoma of unknown primary, central nervous system lymphoma, primary, cerebellar astrocytoma, cerebral astrocytoma/malignant glioma, cervical cancer, childhood cancers, chronic bronchitis, chronic lymphocytic leukemia, chronic myelogenous leukemia, chronic myeloproliferative disorders, colon cancer, cutaneous T-cell lymphoma, desmoplastic small round cell tumor, emphysema, endometrial cancer, ependymoma, esophageal cancer, ewing's sarcoma in the Ewing family of tumors, extracranial germ cell tumor, extragonadal germ cell tumor, extrahepatic bile duct cancer, intraocular melanoma, retinoblastoma, gallbladder cancer, gastric (stomach) cancer, gastrointestinal carcinoid tumor, gastrointestinal stromal tumor, germ cell tumor: extracranial, extragonadal, or ovarian gestational trophoblastic tumor, glioma of the brain stem, glioma, childhood cerebral astrocytoma, childhood visual pathway and hypothalamic, gastric carcinoid, hairy cell leukemia, head and neck cancer, heart cancer, hepatocellular (liver) cancer, hodgkin lymphoma, hypopharyngeal cancer, hypothalamic and visual pathway glioma, intraocular melanoma, islet cell carcinoma (endocrine pancreas), kaposi sarcoma, kidney cancer (renal cell cancer), laryngeal cancer, acute lymphoblastic lymphoma, acute lymphocytic leukemia, acute myelogenous leukemia, chronic lymphocytic leukemia, chronic myeloid leukemia, lip and oral cavity cancer, liposarcoma, liver cancer (primary), lung cancer, non-small cell, small cell, AIDS-related lymphoma, Burkitt lymphoma, cutaneous T-cell lymphoma, hodgkin lymphoma, non-hodgkin lymphoma, lymphoma, primary central nervous system, macroglobulinemia, Waldenstrom, male breast cancer, malignant fibrous histiocytoma of bone/osteosarcoma, medulloblastoma, melanoma, intraocular (eye), merkel cell cancer, mesothelioma, adult malignant, mesothelioma, metastatic squamous neck cancer with occult primary, mouth cancer, multiple endocrine neoplasia syndrome, multiple myeloma/plasma cell neoplasm, mycosis fungoides, myelodysplastic syndromes, myelodysplastic/myeloproliferative diseases, myelogenous leukemia, chronic, myeloid leukemia, adult acute, myeloid leukemia, childhood acute, myeloma, multiple (cancer of the bone-marrow), myeloproliferative disorders, chronic, nasal cavity and paranasal sinus cancer, nasopharyngeal carcinoma, neuroblastoma, non-small cell lung cancer, oligodendroglioma, oral cancer, oropharyngeal cancer, osteosarcoma/malignant fibrous histiocytoma of bone, ovarian cancer, ovarian epithelial cancer (surface epithelial-stromal tumor), ovarian germ cell tumor, ovarian low malignant potential tumor, pancreatic cancer, islet cell, paranasal sinus and nasal cavity cancer, parathyroid cancer, penile cancer, pharyngeal cancer, pheochromocytoma, pineal astrocytoma, pineal germinoma, pineoblastoma and supratentorial primitive neuroectodermal tumors, pituitary adenoma, plasma cell neoplasia/multiple myeloma, pleuropulmonary blastoma, primary central nervous system lymphoma, prostate cancer, rectal cancer, renal cell carcinoma (kidney cancer), renal pelvis and ureter, transitional cell cancer, retinoblastoma, rhabdomyosarcoma, childhood, salivary gland cancer, sarcoma, Ewing family of tumors, Kaposi sarcoma, soft tissue sarcoma, uterine sarcoma, sezary syndrome, skin cancer (non-melanoma), skin cancer (melanoma), merkel cell skin carcinoma, small cell lung cancer, small intestine cancer, soft tissue sarcoma, squamous cell carcinoma—see skin cancer (non-melanoma), squamous neck cancer with occult primary, metastatic, stomach cancer, supratentorial primitive neuroectodermal tumor, T-Cell lymphoma, cutaneous—see Mycosis Fungoides and Sezary syndrome, testicular cancer, throat cancer, thymoma and thymic carcinoma, thyroid cancer, childhood transitional cell cancer of the renal pelvis and ureter, gestational trophoblastic tumor, unknown primary site, carcinoma of, adult unknown primary site, cancer of childhood, ureter and renal pelvis, transitional cell cancer, rethral cancer, uterine cancer, endometrial uterine sarcoma, bronchial tumor, central nervous system embryonal tumor; childhood chordoma, colorectal cancer, craniopharyngioma, ependymoblastoma, langerhans cell histiocytosis, acute lymphoblastic leukemia, acute myeloid leukemia (adult/childhood), small cell lung cancer, medulloepithelioma, oral cavity cancer, papillomatosis, pineal parenchymal tumors of intermediate differentiation, pituary tumor, respiratory tract carcinoma involving the NUT gene on chromosome 15, spinal cord tumor, thymoma, thyroid cancer, vaginal cancer; vulvar cancer, and Wilms tumor.

[0124] Non-limiting examples of tumor or tumor associated antigens include Adipophilin, AIM-2, ALDH1A1, BCLX (L), BING-4, CALCA, CD45, CPSF, cyclin D1, DKK1, ENAH (hMena), EpCAM, EphA3, EZH2, FGF5, glypican-3, G250/MN/CAIX, HER-2/neu, IDO1, IGF2B3, IL13Ralpha2, Intestinal carboxyl esterase, alpha-fetoprotein, Kallikrein 4, KIF20A, Lengsin, M-CSF, MCSP, mdm-2, Meloe, MMP-2, MMP-7, MUC1, MUC5AC, p53, PAX5, PBF, PRAME, PSMA, RAGE-1, RGS5, RhoC, RNF43, RU2AS, secernin 1, SOX10, STEAPI, survivinn, Telomerase, VEGF, or WT1, EGF-R, CEA, CD52, gp 100 protein, MELANA/MART1, NY-ESO-1, p53, MAGE1, MAGE3 and CDK4, alpha-actinin-4, ARTC1, BCR-ABL fusion protein (b3a2), B-RAF, CASP-5, CASP-8, beta-catenin, Cdc27, CDK4, CDKN2A, CLPP, COA-1, dek-can fusion protein, EFTUD2, Elongation factor 2, ETV6-AML1 fusion protein, FLT3-ITD, FN1, GPNMB, LDLR-fucosyltransferaseAS fusion protein, NFYC, OGT, OS-9, pml-RARalpha fusion protein, PRDX5, PTPRK, K-ras, N-ras, RBAF600, SIRT2, SNRPD1, SYT-SSX1 or -SSX2 fusion protein, TGF-betaRII, Triosephosphate isomerase, Lengsin, M-CSF, MCSP, or mdm-2.

[0125] In some embodiments, the heterologous non-arenaviral polypeptide is a respiratory pathogen antigen. In a specific embodiment, the respiratory pathogen is a virus such as RSV, coronavirus, human metapneumovirus, parainfluenza virus, hendra virus, nipah virus, adenovirus, rhinovirus, or PRRSV. Non-limiting examples of respiratory viral antigens include Respiratory Syncytial virus F, G and M2 proteins, Coronavirus (SARS, HuCoV) spike proteins (S), human metapneumovirus fusion proteins, Parainfluenza virus fusion and hemagglutinin proteins (F, HN), Hendra virus (HeV) and Nipah virus (NiV) attachment glycoproteins (G and F), Adenovirus capsid proteins, Rhinovirus proteins, and PRRSV wild type or modified GP5 and M proteins.

[0126] In a specific embodiment, the respiratory pathogen is a bacteria such as Bacillus anthracis, Mycobacterium tuberculosis, Bordetella pertussis, Streptococcus pneumoniae, Yersinia pestis, Staphylococcus aureus, Francisella tularensis, Legionella pneumophila, Chlamydia pneumoniae, Pseudomonas aeruginosa, Neisseria meningitides, and Haemophilus influenzae. Non-limiting examples of respiratory bacterial antigens include Bacillus anthracis Protective antigen PA, Mycobacterium tuberculosis mycobacterial antigen 85A and heat shock protein (Hsp65), Bordetella pertussis pertussis toxoid (PT) and filamentous hemagglutinin (FHA), Streptococcus pneumoniae sortase A and surface adhesin A (PsaA), Yersinia pestis F1 and V subunits, and proteins from Staphylococcus aureus, Francisella tularensis, Legionella pneumophila, Chlamydia pneumoniae, Pseudomonas aeruginosa, Neisseria meningitides, and Haemophilus influenzae.

[0127] In some embodiments, the heterologous non-arenaviral polypeptide is a T-cell epitope. In other embodiments, the heterologous ORF encodes a cytokine or growth factor.

[0128] In other embodiments, the heterologous non-arenaviral polypeptide is an antigen expressed in an autoimmune disease. In more specific embodiments, the autoimmune disease can be type I diabetes, multiple sclerosis, rheumatoid arthritis, lupus erythmatosus, and psoriasis. Non-limiting examples of autoimmune disease antigens include Ro60, dsDNA, or RNP.

[0129] In other embodiments, the heterologous non-arenaviral polypeptide is an antigen expressed in an allergic disease. In more specific embodiments, the allergic disease can include but is not limited to seasonal and perennial rhinoconjunctivitis, asthma, and eczema. Non-limiting examples of allergy antigens include Bet v 1 and Fel d 1.

### 5.4 Buffer Peptide

[0130] In certain embodiments, provided herein is a buffer peptide. In some embodiments, the buffer peptide is on the C-terminus or is fused to the C-terminus of an arenavirus GP signal peptide. In some embodiments, the buffer peptide is fused to the N-terminus of a heterologous non-arenaviral polypeptide. In some embodiments, the arenavirus does not comprise a buffer peptide. In some embodiments, the GP signal peptide (or a functional fragment thereof or a polypeptide comprising such a functional fragment or the GP signal peptide) is fused to a buffer peptide, which in turn is fused to a heterologous non-arenaviral polypeptide. In some embodiments, following translation of the GP signal peptide (or functional fragment thereof or polypeptide comprising the GP signal peptide or functional fragment thereof) and the buffer peptide (and, optionally, the heterologous non-arenaviral polypeptide), a peptidase can cleave the GP signal peptide (or functional fragment thereof or polypeptide comprising the GP signal peptide or functional fragment thereof)/buffer peptide fusion close to (eg, −5, −4, −3, −2, −1, +1, +2, +3, +4, or +5 amino acid position from the fusion site) or at the fusion site. In some embodiments, the sequence of an arenavirus GP signal peptide, a buffer peptide, and a heterologous non-arenaviral polypeptide is from N-terminus to C-terminus. In some embodiments, a GP signal peptide is fused to a buffer peptide. In some embodiments, a buffer peptide is fused to a heterologous non-arenaviral polypeptide. In some embodiments, a GP signal peptide, a buffer peptide, and a heterologous non-arenaviral polypeptide generate a fusion protein. In some embodiments, a GP signal peptide, a buffer peptide, and a heterologous non-arenaviral polypeptide are fused in this order from N-terminus to C-terminus. In some embodiments, a buffer peptide is about, at least about, or at most about: 1, 2, 3, 4, 5, 6,7, 8, 9, 10, 11, 12, 13, 14, 15, 16, 17, 18, 19, 20, 21, 22, 23, 24, 25, 26, 27, 28, 29, 30, 31, 32, 33, 34, 35, 36, 37, 38, 39, 40, 41, 42, 43, 44, 45, 46, 47, 48, 49, 50, 51, 52, 53, 54, 55, 56, 57, 58, 59, 60, 61, 62, 63, 64, 65, 66, 67, 68, 69, 70, 71, 72, 73, 74, 75, 76, 77, 78, 79, 80, 81, 82, 83, 84, 85, 86, 87, 88, 89, 90, 91, 92, 93, 94, 95, 96, 97, 98, 99, 100, 105, 110, 115, 120, 125, 130, 135, 140, 145, 150, 155, 160, 165, 170, 175, 180, 185, 190, 195, 200, or more than about 200 amino acids long.

[0131] Without being bound by theory, the presence of a buffer peptide following the GP signal peptide (or functional fragment thereof or polypeptide comprising such a functional fragment or the GP signal peptide) enhances the cleavage of the GP signal peptide from the remainder of the fusion peptide. In a specific embodiment, growth of a trisegmented virus as described herein with a buffer peptide as described herein (or test virus) is compared to the growth of a control virus, which has the same genomic organization as the test virus except that the buffer peptide is absent from the control virus. In a specific embodiment, growth of a trisegmented virus as described herein with a buffer peptide as described herein (or test virus) is compared to the growth of a control virus, which has the same genomic organization as the test virus except that the buffer peptide is a wild type peptide sequence. In certain embodiments, the test virus grows to a titre about or at least about 2-fold, 3-fold, 4-fold, 5-fold, 6-fold, 7-fold, 8-fold, 9-fold, 10-fold, 15-fold, 20-fold, or about or at least about 25-fold higher than the control virus using the same culture conditions for test and control virus. In certain embodiments, the test virus reaches peak titers 1 hour, 2 hours, 3 hours, 4 hours, 5 hours, 6 hours, 7 hours, 8 hours, 9 hours, 10 hours, 11 hours, 12 hours, 24 hours, 36 hours, 48 hours, 60 hours, 72 hours, 84 hours, or 96 hours earlier than the control virus using the same culture conditions for test and control virus. In certain embodiments, the test virus exhibits about or at least about 2-fold, 3-fold, 4-fold, 5-fold, 6-fold, 7-fold, 8-fold, 9-fold, 10-fold, or higher than 10-fold rescue efficiency (i.e., higher percentage of RCV titer-positive rescues of total rescues) than the control virus using the same vector rescue conditions for test and control virus. In some embodiments, the control virus is an arenavirus that does not comprise a buffer peptide. In some embodiments, the control virus is identical to an arenavirus of the present disclosure except that the control virus does not include a buffer peptide. In some embodiments, the control virus is a wild-type arenavirus.

[0132] In some embodiments, a buffer peptide comprises or consists of a fragment of an arenavirus GP1. In some embodiments, the fragment is shorter than the sequence of an arenavirus GP1. In some embodiments, the fragment of an arenavirus GP1 comprises about, at most about, or at least about 1, 2, 3, 4, 5, 10, 15, 20, 25, 30, 35, 40, 45, 50, 55, 60, or more than 60 amino acids of an arenavirus GP1. In some embodiments, a fragment of an arenavirus GP1 is an N-terminal fragment of an arenavirus GP1. In some embodiments, a fragment of an arenavirus GP1 is a C-terminal fragment of an arenavirus GP1. In some embodiments, a buffer peptide comprises or consists of an amino acid sequence that is about or at least about 80%, 85%, 90%, 95%, 96%, 97%, 98%, 99% or 100% identical to a portion of the amino acid sequence of SEQ ID NO:31, SEQ ID NO:32, SEQ ID NO:33, SEQ ID NO:142, SEQ ID NO:34, SEQ ID NO:35, SEQ ID NO:36, SEQ ID NO:54, SEQ ID NO:61, SEQ ID NO:68, SEQ ID NO:75, SEQ ID NO:86, SEQ ID NO:93, SEQ ID NO:100, SEQ ID NO:115, SEQ ID NO:122, SEQ ID NO:129, SEQ ID NO:136, SEQ ID NO:143, SEQ ID NO:144, SEQ ID NO: 147, SEQ ID NO:148, SEQ ID NO:152, SEQ ID NO:153, SEQ ID NO:158, SEQ ID NO:159, SEQ ID NO:160, SEQ ID NO:164, or SEQ ID NO:165. In some embodiments, a buffer peptide comprises a basic and/or neutral and/or nonpolar aliphatic and/or nonpolar aromatic and/or polar (e.g., neutral, positively charged or negatively charged) and/or acidic amino acid corresponding to one or more of positions 1, 2, 3, 4, 5, 6, and/or 7 of the amino acid sequence of SEQ ID NO:31, SEQ ID NO:32, SEQ ID NO:33, SEQ ID NO:142, SEQ ID NO:34, SEQ ID NO:35, SEQ ID NO:36, SEQ ID NO:54, SEQ ID NO:61, SEQ ID NO:68, SEQ ID NO:75, SEQ ID NO:86, SEQ ID NO:93, SEQ ID NO: 100, SEQ ID NO: 115, SEQ ID NO:122, SEQ ID NO:129, SEQ ID NO:136, SEQ ID NO:143, SEQ ID NO:144, SEQ ID NO: 147, SEQ ID NO:148, SEQ ID NO:152, SEQ ID NO:153, SEQ ID NO:158, SEQ ID NO:159, SEQ ID NO:160, SEQ ID NO:164, or SEQ ID NO:165. For example, in some embodiments, the methionines at positions 2 and 3 of SEQ ID NO: 33 are mutated to a nonpolar aliphatic amino acid (e.g., glycine, alanine, proline, valine, leucine, methionine, or isoleucine), a basic amino acid (e.g., arginine, lysine, or histidine), an acidic amino acid (e.g., aspartic acid or glutamic acid), a nonpolar aromatic amino acid (e.g., phenylalanine, tyrosine, or tryptophan) and/or a polar amino acid (e.g., serine, threonine, cysteine, asparagine, glutamine, lysine, arginine, histidine, aspartic acid, or glutamic acid). In some embodiments, the methionines at positions 2 and 3 of SEQ ID NO: 33 are both mutated to leucine. In some embodiments, the methionines at positions 2 and 3 of SEQ ID NO: 33 are both mutated to aspartic acid. In some embodiments, the methionines at positions 2 and 3 of SEQ ID NO: 33 are both mutated to glycine. In some embodiments, the methionines at positions 2 and 3 of SEQ ID NO: 33 are both mutated to glutamic acid. In some embodiments, the methionines at positions 2 and 3 of SEQ ID NO: 33 are both mutated to histidine. In some embodiments, the methionines at positions 2 and 3 of SEQ ID NO: 33 are both mutated to lysine. In some embodiments, the portion of the amino acid sequence is any portion of a sequence and can range in the number of amino acids. In some embodiments, the portion of the amino acid sequence is from about amino acid 1 to about amino acid 5, from about amino acid 1 to about amino acid 10, from about amino acid 1 to about amino acid 15, from about amino acid 1 to about amino acid 20, from about amino acid 1 to about amino acid 25, from about amino acid 1 to about amino acid 30, from about amino acid 1 to about amino acid 35, from about amino acid 1 to about amino acid 40, from about amino acid 1 to about amino acid 45, from about amino acid 1 to about amino acid 50, from about amino acid 1 to about amino acid 51, from about amino acid 1 to about amino acid 52, from about amino acid 1 to about amino acid 53, from about amino acid 1 to about amino acid 54, from about amino acid 1 to about amino acid 55, from about amino acid 1 to about amino acid 56, from about amino acid 1 to about amino acid 57, from about amino acid 1 to about amino acid 58, from about amino acid 1 to about amino acid 59, from about amino acid 1 to about amino acid 60, from about amino acid 1 to about amino acid 61, from about amino acid 1 to about amino acid 62, from about amino acid 1 to about amino acid 63, from about amino acid 1 to about amino acid 64, from about amino acid 1 to about amino acid 65, from about amino acid 1 to about amino acid 66, from about amino acid 1 to about amino acid 67, from about amino acid 1 to about amino acid 68, from about amino acid 1 to about amino acid 69, from about amino acid 1 to about amino acid 70, from about amino acid 1 to about amino acid 71, from about amino acid 1 to about amino acid 72, from about amino acid 1 to about amino acid 73, from about amino acid 1 to about amino acid 74, from about amino acid 1 to about amino acid 75, from about amino acid 1 to about amino acid 76, from about amino acid 1 to about amino acid 77, from about amino acid 1 to about amino acid 78, from about amino acid 1 to about amino acid 79, from about amino acid 1 to about amino acid 80, from about amino acid 1 to about amino acid 81, from about amino acid 1 to about amino acid 82, from about amino acid 1 to about amino acid 83, from about amino acid 1 to about amino acid 84, from about amino acid 1 to about amino acid 85, from about amino acid 1 to about amino acid 86, from about amino acid 1 to about amino acid 87, from about amino acid 1 to about amino acid 88, from about amino acid 1 to about amino acid 89, from about amino acid 1 to about amino acid 90, from about amino acid 1 to about amino acid 91, from about amino acid 1 to about amino acid 92, from about amino acid 1 to about amino acid 93, from about amino acid 1 to about amino acid 94, from about amino acid 1 to about amino acid 95, from about amino acid 1 to about amino acid 96, from about amino acid 1 to about amino acid 97, from about amino acid 1 to about amino acid 98, from about amino acid 1 to about amino acid 99, from about amino acid 1 to about amino acid 100, from about amino acid 1 to about amino acid 101, from about amino acid 1 to about amino acid 102, from about amino acid 1 to about amino acid 103, from about amino acid 1 to about amino acid 104, from about amino acid 1 to about amino acid 105, from about amino acid 1 to about amino acid 106, from about amino acid 1 to about amino acid 107, from about amino acid 1 to about amino acid 108, from about amino acid 1 to about amino acid 109, from about amino acid 1 to about amino acid 110, from about amino acid 1 to about amino acid 111, from about amino acid 1 to about amino acid 112, from about amino acid 1 to about amino acid 113, or from about amino acid 1 to about or more than about amino acid 114 (e.g., 115, 120, 125, 130, 135, 140, 145, 150, 200, 250, 300, etc.) of SEQ ID NO:31, SEQ ID NO:32, SEQ ID NO:33, SEQ ID NO:142, SEQ ID NO:34, SEQ ID NO:35, SEQ ID NO:36, SEQ ID NO:54, SEQ ID NO:61, SEQ ID NO:68, SEQ ID NO:75, SEQ ID NO:86, SEQ ID NO:93, SEQ ID NO:100, SEQ ID NO: 115, SEQ ID NO:122, SEQ ID NO:129, SEQ ID NO:136, SEQ ID NO:143, SEQ ID NO:144, SEQ ID NO: 147, SEQ ID NO:148, SEQ ID NO:152, SEQ ID NO:153, SEQ ID NO:158, SEQ ID NO:159, SEQ ID NO:160, SEQ ID NO:164, or of an arenavirus GP1 sequence.

[0133] In some embodiments, a buffer peptide comprises about 1%, 2%, 5%, 10%, 15%, 20%, 25%, 30% basic amino acids. In some embodiments, a buffer peptide comprises at most about 1%, 2%, 5%, 10%, 15%, 20%, 25%, 30% basic amino acids. In some embodiments, a buffer peptide comprises at least about 1%, 2%, 5%, 10%, 15%, 20%, 25%, 30% basic amino acids. In some embodiments, the first 3 N-terminal amino acids of the buffer peptide include about, or at most about 1, 2, or 3 basic amino acids. In some embodiments, the first 3 N-terminal amino acids of the buffer peptide include about, at least about, or at most about 1 or 2 basic amino acids. In some embodiments, the first 5 N-terminal amino acids of the buffer peptide include about, or at most about 1, 2, 3, 4, or 5 basic amino acids. In some embodiments, the first 5 N-terminal amino acids of the buffer peptide include about, at least about, or at most about 1, 2, or 3 basic amino acids. In some embodiments, the first 8 N-terminal amino acids of the buffer peptide include about, or at most about 1, 2, 3, 4, 5, 6, 7, or 8 basic amino acids. In some embodiments, the first 8 N-terminal amino acids of the buffer peptide include about, at least about, or at most about 1, 2, 3, 4, or 5 basic amino acids. In some embodiments, the first 10 N-terminal amino acids of the buffer peptide include about, or at most about 1, 2, 3, 4, 5, 6, 7, 8, 9, or 10 basic amino acids. In some embodiments, the first 10 N-terminal amino acids of the buffer peptide include about, at least about, or at most about 1, 2, 3, 4, 5, 6, 7, or 8 basic amino acids. In some embodiments, the first 20 N-terminal amino acids of the buffer peptide include about, or at most about 1, 2, 3, 4, 5, 6, 7, 8, 9, 10, 11, 12, 13, 14, 15, 16, 17, 18, 19, or 20 basic amino acids. In some embodiments, the first 20 N-terminal amino acids of the buffer peptide include about, at least about, or at most about 1, 2, 3, 4, 5, 6, 7, 8, 9, 10, 11, 12, 13, 14, 15, 16, 17, or 18 basic amino acids.

[0134] In some embodiments, the first 3 N-terminal amino acids of the buffer peptide comprise about or at least about 1, 2, or 3 acidic and/or neutral and/or nonpolar aliphatic amino acids. In some embodiments, the first 4 N-terminal amino acids of the buffer peptide comprise about or at least about 1, 2, 3, or 4 acidic and/or neutral and/or nonpolar aliphatic amino acids. In some embodiments, the first 5 N-terminal amino acids of the buffer peptide comprise about or at least about 1, 2, 3, 4, or 5 acidic and/or neutral and/or nonpolar aliphatic amino acids. In some embodiments, the first 6 N-terminal amino acids of the buffer peptide comprise about or at least about 1, 2, 3, 4, 5, or 6 acidic and/or neutral and/or nonpolar aliphatic amino acids. In some embodiments, the first 7 N-terminal amino acids of the buffer peptide comprise about or at least about 1, 2, 3, 4, 5, 6, or 7 acidic and/or neutral and/or nonpolar aliphatic amino acids. In some embodiments, the first 8 N-terminal amino acids of the buffer peptide comprise about or at least about 1, 2, 3, 4, 5, 6, 7, or 8 acidic and/or neutral and/or nonpolar aliphatic amino acids. In some embodiments, the first 9 N-terminal amino acids of the buffer peptide comprise about or at least about 1, 2, 3, 4, 5, 6, 7, 8, or 9 acidic and/or neutral and/or nonpolar aliphatic amino acids. In some embodiments, the first 10 N-terminal amino acids of the buffer peptide comprise about or at least about 1, 2, 3, 4, 5, 6, 7, 8, 9, or 10 acidic and/or neutral and/or nonpolar aliphatic amino acids. In some embodiments, the first 20 N-terminal amino acids of the buffer peptide comprise about or at least about 1, 2, 3, 4, 5, 6, 7, 8, 9, 10, 11, 12, 13, 14, 15, 16, 17, 18, 19, or 20 acidic and/or neutral and/or nonpolar aliphatic amino acids.

[0135] In some embodiments, the last C-terminal amino acid of the buffer peptide is a basic amino acid. In some embodiments, the last 2 C-terminal amino acids of the buffer peptide comprise 1 or 2 basic amino acids. In some embodiments, the last 3 C-terminal amino acids of the buffer peptide comprise 1, 2, or 3 basic amino acids. In some embodiments, the last 4 C-terminal amino acids of the buffer peptide comprise 1, 2, 3, or 4 basic amino acids. In some embodiments, the last 5 C-terminal amino acids of the buffer peptide comprise 1, 2, 3, 4, or 5 basic amino acids. In some embodiments, the last 6 C-terminal amino acids of the buffer peptide comprise 1, 2, 3, 4, 5, or 6 basic amino acids. In some embodiments, the last 7 C-terminal amino acids of the buffer peptide comprise 1, 2, 3, 4, 5, 6, or 7 basic amino acids. In some embodiments, the last 8 C-terminal amino acids of the buffer peptide comprise 1, 2, 3, 4, 5, 6, 7, or 8 basic amino acids. In some embodiments, the last 9 C-terminal amino acids of the buffer peptide comprise 1, 2, 3, 4, 5, 6, 7, 8, or 9 basic amino acids. In some embodiments, the last 10 C-terminal amino acids of the buffer peptide comprise 1, 2, 3, 4, 5, 6, 7, 8, 9, or 10 basic amino acids. In some embodiments, the 5 amino acids C-terminal to the first 5, 6, 7, or 8 N-terminal amino acids of the buffer peptide comprise about or at most about 1, 2, or 3 basic amino acids. In some embodiments, the 3 C-terminal amino acids to the first 3 to 10 N-terminal amino acids of the buffer peptide comprise about or at most about 1, 2, or 3 basic amino acids. In some embodiments, the buffer peptide does not comprise a basic amino acid. In some embodiments, the buffer peptide is devoid of basic amino acids. In some embodiments, the first 2 N-terminal amino acids of the buffer peptide do not comprise basic amino acids. In some embodiments, the first 3 N-terminal amino acids of the buffer peptide do not comprise basic amino acids. In some embodiments, the first 4 N-terminal amino acids of the buffer peptide do not comprise basic amino acids. In some embodiments, the first 5 N-terminal amino acids of the buffer peptide do not comprise basic amino acids. In some embodiments, the first 6 N-terminal amino acids of the buffer peptide do not comprise basic amino acids. In some embodiments, the first 7 N-terminal amino acids of the buffer peptide do not comprise basic amino acids. In some embodiments, the first 8 N-terminal amino acids of the buffer peptide do not comprise basic amino acids. In some embodiments, the first 9 N-terminal amino acids of the buffer peptide do not comprise basic amino acids. In some embodiments, the first 10 N-terminal amino acids of the buffer peptide do not comprise basic amino acids.

[0136] In some embodiments, the buffer peptide comprises about, at most about, or at least about 20%, 25%, 30%, 35%, 40%, 45%, 50%, 55% 60%, 65%, 70%, 75%, 80%, 85%, 90%, 95%, 96%, 97%, 98%, 99%, or 100% acidic amino acids and/or neutral and/or nonpolar aliphatic amino acids. In some embodiments, the buffer peptide comprises about, at most about, or at least about 20%, 25%, 30%, 35%, 40%, 45%, 50%, 55% 60%, 65%, 70%, 75%, 80%, 85%, 90%, 95%, 96%, 97%, 98%, 99%, or 100% acidic amino acids. In some embodiments, the buffer peptide comprises about, at most about, or at least about 20%, 25%, 30%, 35%, 40%, 45%, 50%, 55% 60%, 65%, 70%, 75%, 80%, 85%, 90%, 95%, 96%, 97%, 98%, 99%, or 100% neutral amino acids. In some embodiments, the buffer peptide comprises about, at most about, or at least about 20%, 25%, 30%, 35%, 40%, 45%, 50%, 55% 60%, 65%, 70%, 75%, 80%, 85%, 90%, 95%, 96%, 97%, 98%, 99%, or 100% nonpolar aliphatic amino acids.

[0137] In some embodiments, the first 2 N-terminal amino acids of the buffer peptide comprise about or at least about 50% or 100% acidic amino acids and/or neutral and/or nonpolar aliphatic amino acids. In some embodiments, the first 3 N-terminal amino acids of the buffer peptide comprise about or at least about 20%, 25%, 30%, 35%, 40%, 45%, 50%, 55% 60%, 65%, 70%, 75%, 80%, 8% 5, ⁹ 0, 95% 96%, 97%, 98%, 99%, or 100% acidic amino acids and/or neutral and/or nonpolar aliphatic amino acids. In some embodiments, the first 4 N-terminal amino acids of the buffer peptide comprise about or at least about 20%, 25%, 30%, 35%, 40%, 45%, 50%, 55% 60%, 65%, 70%, 75%, 80%, 85%, 90%, 95%, 96%, 97%, 98%, 99%, or 100% acidic amino acids and/or neutral and/or nonpolar aliphatic amino acids. In some embodiments, the first 5 N-terminal amino acids of the buffer peptide comprise about or at least about 20%, 25%, 30%, 35%, 40%, 45%, 50%, 55% 60%, 65%, 70%, 75%, 80%, 85%, 90%, 95%, 96%, 97%, 98%, 99%, or 100% acidic amino acids and/or neutral and/or nonpolar aliphatic amino acids. In some embodiments, the first 6 N-terminal amino acids of the buffer peptide comprise about or at least about 20%, 25%, 30%, 35%, 40%, 45%, 50%, 55% 60%, 65%, 70%, 75%, 80%, 85%, 90%, 95%, 96%, 97%, 98%, 99%, or 100% acidic amino acids and/or neutral and/or nonpolar aliphatic amino acids. In some embodiments, the first 7 N-terminal amino acids of the buffer peptide comprise about or at least about 20%, 25%, 30%, 35%, 40%, 45%, 50%, 55% 60%, 65%, 70%, 75%, 80%, 85%, 90%, 95%, 96%, 97%, 98%, 99%, or 100% acidic amino acids and/or neutral and/or nonpolar aliphatic amino acids. In some embodiments, the first 8 N-terminal amino acids of the buffer peptide comprise about or at least about 20%, 25%, 30%, 35%, 40%, 45%, 50%, 55% 60%, 65%, 70%, 75%, 80%, 85%, 90%, 95%, 96%, 97%, 98%, 99%, or 100% acidic amino acids and/or neutral and/or nonpolar aliphatic amino acids. In some embodiments, the first 9 N-terminal amino acids of the buffer peptide comprise about or at least about 20%, 25%, 30%, 35%, 40%, 45%, 50%, 55% 60%, 65%, 70%, 75%, 80%, 85%, 90%, 95%, 96%, 97%, 98%, 99%, or 100% acidic amino acids and/or neutral and/or nonpolar aliphatic amino acids. In some embodiments, the first 10 N-terminal amino acids of the buffer peptide comprise about or at least about 20%, 25%, 30%, 35%, 40%, 45%, 50%, 55% 60%, 65%, 70%, 75%, 80%, 85%, 90%, 95%, 96%, 97%, 98%, 99%, or 100% acidic amino acids and/or neutral and/or nonpolar aliphatic amino acids.

[0138] In some embodiments, an arenavirus GP signal peptide can be cleaved from a buffer peptide or a portion thereof by a signal peptide peptidase. In some embodiments, a signal peptide peptidase cleaves immediately N-terminal to a buffer peptide (e.g., cleaves an an arenavirus GP signal peptide from a buffer peptide immediately N-terminal to a buffer peptide). In some embodiments, a signal peptide peptidase cleaves after the first N-terminal amino acid of the buffer peptide. In some embodiments, a signal peptide peptidase cleaves after the second N-terminal amino acid of the buffer peptide. In some embodiments, a signal peptide peptidase cleaves after the third N-terminal amino acid of the buffer peptide. In some embodiments, a signal peptide peptidase cleaves after the fourth N-terminal amino acid of the buffer peptide. In some embodiments, a signal peptide peptidase cleaves after the fifth N-terminal amino acid of the buffer peptide. In some embodiments, a signal peptide peptidase cleaves after the sixth N-terminal amino acid of the buffer peptide. In some embodiments, a signal peptide peptidase cleaves after the seventh N-terminal amino acid of the buffer peptide. In some embodiments, a signal peptide peptidase cleaves after the 8 N-terminal amino acid of the buffer peptide. In some embodiments, a signal peptide peptidase cleaves after the 9 N-terminal amino acid of the buffer peptide. In some embodiments, a signal peptide peptidase cleaves after the 10 N-terminal amino acid of the buffer peptide (or more than after the 10 N-terminal amino acid).

[0139] In some embodiments, an arenavirus GP signal peptide is cleaved at exactly the position where a buffer peptide starts. In some embodiments, an arenavirus GP signal peptide is cleaved at amino acid 1, 2, 3, 4, 5, 6, 7, 8, 9, 10, or more than 10 amino acids N-terminal from where a buffer peptide starts. In some embodiments, an arenavirus GP signal peptide is cleaved at amino acid 1, 2, 3, 4, 5, 6, 7, 8, 9, 10, or more than 10 amino acids C-terminal from where a buffer peptide starts.

[0140] In some embodiments, a buffer peptide starts at about or at least about amino acid 54, 55, 56, 57, 58, 59, 60, 61, or 62 of an amino acid sequence of a glycoprotein precursor. In some embodiments, a buffer peptide starts at about amino acid 58 of an amino acid sequence of a glycoprotein precursor. In some embodiments, a buffer peptide starts at about amino acid 59 of an amino acid sequence of a glycoprotein precursor. In some embodiments, a buffer peptide starts at about amino acid 60 of an amino acid sequence of a glycoprotein precursor. In some embodiments, a buffer peptide starts at about amino acid 61 of an amino acid sequence of a glycoprotein precursor. In some embodiments, a buffer peptide starts at about or at least about amino acid 54, 55, 56, 57, 58, 59, 60, 61, or 62 of an amino acid sequence of any one of SEQ ID NO:1, SEQ ID NO:2, SEQ ID NO:3, SEQ ID NO:4, SEQ ID NO:5, SEQ ID NO:6, SEQ ID NO:48, SEQ ID NO:52, SEQ ID NO:59, SEQ ID NO:66, SEQ ID NO:73, SEQ ID NO:80, SEQ ID NO:84, SEQ ID NO:91, SEQ ID NO:98, SEQ ID NO:105, SEQ ID NO:109, SEQ ID NO:113, SEQ ID NO:120, SEQ ID NO:127, and/or SEQ ID NO: 134. In some embodiments, one, two, or more than two, or at least one amino acid at position 54, 55, 56, 57, 58, 59, 60, 61, 62, 63, 64, 65, 66, 67, and/or 68 of an amino acid sequence of any one of SEQ ID NO:1, SEQ ID NO:2, SEQ ID NO:3, SEQ ID NO:4, SEQ ID NO:5, SEQ ID NO:6, SEQ ID NO:48, SEQ ID NO:52, SEQ ID NO:59, SEQ ID NO:66, SEQ ID NO:73, SEQ ID NO:80, SEQ ID NO:84, SEQ ID NO:91, SEQ ID NO:98, SEQ ID NO:105, SEQ ID NO:109, SEQ ID NO:113, SEQ ID NO:120, SEQ ID NO:127, and/or SEQ ID NO:134 comprises or is mutated to a basic amino acid, neutral amino acid, nonpolar aliphatic amino acid, nonpolar aromatic amino acid, polar (e.g., neutral, positively charged or negatively charged) amino acid, acidic amino acid, or a combination thereof. In some embodiments, the amino acid at position 60 of an amino acid sequence of a glycoprotein precursor comprises or is mutated to a nonpolar aliphatic amino acid (e.g., glycine, alanine, proline, valine, leucine, methionine, or isoleucine), a basic amino acid (e.g., arginine, lysine, or histidine), an acidic amino acid (e.g., aspartic acid or glutamic acid), a nonpolar aromatic amino acid (e.g., phenylalanine, tyrosine, or tryptophan) and/or a polar amino acid (e.g., serine, threonine, cysteine, asparagine, glutamine, lysine, arginine, histidine, aspartic acid, or glutamic acid). In some embodiments, the amino acid at position 61 of an amino acid sequence of a glycoprotein precursor comprises or is mutated to a nonpolar aliphatic amino acid (e.g., glycine, alanine, proline, valine, leucine, methionine, or isoleucine), a basic amino acid (e.g., arginine, lysine, or histidine), an acidic amino acid (e.g., aspartic acid or glutamic acid), a nonpolar aromatic amino acid (e.g., phenylalanine, tyrosine, or tryptophan) and/or a polar amino acid (e.g., serine, threonine, cysteine, asparagine, glutamine, lysine, arginine, histidine, aspartic acid, or glutamic acid). In some embodiments, the amino acid at position 60 of an amino acid sequence of a glycoprotein precursor comprises or is mutated to a basic amino acid. In some embodiments, the amino acid at position 61 of an amino acid sequence of a glycoprotein precursor comprises or is mutated to a basic amino acid. In some embodiments, the amino acid at positions 60 and 61 of an amino acid sequence of a glycoprotein precursor (e.g., SEQ ID NO: 3) comprise or are mutated to a basic amino acid (e.g., arginine, histidine, and/or lysine). In some embodiments, the amino acid at position 60 of an amino acid sequence of a glycoprotein precursor comprises or is mutated to a nonpolar aliphatic amino acid (e.g., glycine, alanine, proline, valine, leucine, isoleucine, or methionine). In some embodiments, the amino acid at position 61 of an amino acid sequence of a glycoprotein precursor comprises or is mutated to a nonpolar aliphatic amino acid (e.g., glycine, alanine, proline, valine, leucine, isoleucine, or methionine). In some embodiments, the amino acids at positions 60 and 61 of an amino acid sequence of a glycoprotein precursor (e.g., SEQ ID NO: 3) comprise or are mutated to a nonpolar aliphatic amino acid (e.g., glycine, alanine, proline, valine, leucine, isoleucine, and/or methionine). In some embodiments, the amino acid at position 60 of an amino acid sequence of a glycoprotein precursor comprises or is mutated to a polar amino acid. In some embodiments, the amino acid at position 61 of an amino acid sequence of a glycoprotein precursor comprises or is mutated to a polar amino acid. In some embodiments, the amino acids at positions 60 and 61 of an amino acid sequence of a glycoprotein precursor (e.g., SEQ ID NO: 3) comprise or are mutated to a polar amino acid. In some embodiments, the amino acid at position 60 of an amino acid sequence of a glycoprotein precursor comprises or is mutated to an acidic amino acid. In some embodiments, the amino acid at position 61 of an amino acid sequence of a glycoprotein precursor comprises or is mutated to an acidic amino acid. In some embodiments, the amino acids at positions 60 and 61 of an amino acid sequence of a glycoprotein precursor (e.g., SEQ ID NO: 3) comprise or are mutated to an acidic amino acid. In some embodiments, the amino acid at position 60 of an amino acid sequence of a glycoprotein precursor comprises or is mutated to a nonpolar aromatic amino acid. In some embodiments, the amino acid at position 61 of an amino acid sequence of a glycoprotein precursor comprises or is mutated to a nonpolar aromatic amino acid. In some embodiments, the amino acids at positions 60 and 61 of an amino acid sequence of a glycoprotein precursor (e.g., SEQ ID NO: 3) comprise or are mutated to a nonpolar aromatic amino acid. In some embodiments, the methionines at positions 60 and 61 of an amino acid sequence of a glycoprotein precursor (e.g., SEQ ID NO: 3) are both mutated to leucine. In some embodiments, the methionines at positions 60 and 61 of an amino acid sequence of a glycoprotein precursor (e.g., SEQ ID NO: 3) are both mutated to aspartic acid. In some embodiments, the methionines at positions 60 and 61 of an amino acid sequence of a glycoprotein precursor (e.g., SEQ ID NO: 3) are both mutated to glycine. In some embodiments, the methionines at positions 60 and 61 of an amino acid sequence of a glycoprotein precursor (e.g., SEQ ID NO: 3) are both mutated to glutamic acid. In some embodiments, the methionines at positions 60 and 61 of an amino acid sequence of a glycoprotein precursor (e.g., SEQ ID NO: 3) are both mutated to histidine. In some embodiments, the methionines at positions 60 and 61 of an amino acid sequence of a glycoprotein precursor (e.g., SEQ ID NO: 3) are both mutated to lysine.

### 5.5 Nucleotide Sequence Provided Herein

[0141] In one aspect, provided herein are nucleotide sequences. In certain embodiments, provided herein is a nucleotide sequence comprising a first open reading frame (ORF) and a second ORF, wherein one of the two ORFs is in sense orientation and the other ORF is in antisense orientation;

wherein the first ORF comprises a nucleotide sequence encoding a functional fragment of a first polypeptide fused to a buffer peptide (as described above; see Section 5.4), and the first ORF does not encode the full-length first polypeptide;
wherein the second ORF comprises a nucleotide sequence encoding:
[0142] a) a second polypeptide; or
[0143] b) a functional fragment of the first polypeptide, and the second ORF does not encode the full-length first polypeptide; or
[0144] c) a functional fragment of a second polypeptide, and the second ORF does not encode the full-length second polypeptide; or
[0145] d) a heterologous non-arenaviral polypeptide; and
   wherein the first and second polypeptides are different from each other and selected from the group consisting of arenavirus GP, NP, Z and L.

[0146] In certain embodiments, the first ORF and the second ORF are separated by an arenavirus intergenic region (IGR) and each ORF is under control of an arenavirus 3′ untranslated region (UTR) or an arenavirus 5′ UTR.

[0147] In certain embodiments, the first ORF further comprises a nucleotide sequence encoding a second heterologous non-arenaviral polypeptide or a third polypeptide; wherein the third polypeptide is different from the first polypeptide and second polypeptide and is selected from the group consisting of arenavirus GP, NP, Z and L; and wherein the heterologous non-arenaviral polypeptide and the second heterologous non-arenaviral polypeptide are the same or different from each other.

[0148] In certain embodiments, the second ORF further comprises a nucleotide sequence encoding a second heterologous non-arenaviral polypeptide or a third polypeptide; wherein the third polypeptide is different from the first polypeptide and second polypeptide and is selected from the group consisting of arenavirus GP, NP, Z and L; and wherein the heterologous non-arenaviral polypeptide and the second heterologous non-arenaviral polypeptide are the same or different from each other.

[0149] In certain embodiments, the first ORF is part of a transcription unit that further comprises another ORF, wherein the other ORF and the first ORF are separated by an internal ribosome entry site (IRES). In certain embodiments, the second ORF is part of a transcription unit that further comprises another ORF, wherein the other ORF and the second ORF are separated by an IRES. In certain embodiments, the first ORF and/or the second ORF comprises a nucleotide sequence encoding an arenavirus GP signal peptide and a buffer peptide or a functional fragment of the GP signal peptide or a polypeptide comprising such a functional fragment fused to a buffer peptide and the other ORF comprises a nucleotide sequence encoding a heterologous non-arenaviral polypeptide or an arenavirus NP, Z, or L.

[0150] In certain embodiments, the arenavirus GP, NP, Z and L are from LCMV, Lassa virus, Pichinde virus, Oliveros virus, Tamiami virus, Mobala virus, Mopeia virus, Ippy virus, Amapari virus, Flexal virus, Guanarito virus, Latino virus, Machupo virus, Parana virus, Pirital virus, Sabia virus, Tacaribe virus, Bear Canyon virus, Whitewater Arroyo virus, Allpahuayo virus (ALLV), Alxa virus, Chapare virus, Lijiang virus, Cupixi virus, Gairo virus, Loei River virus, Lujo virus, Luna virus, Luli virus, Lunk virus, Mariental virus, Merino Walk virus, Morogoro virus, Okahandja virus, Apore virus, Ryukyu virus, Solwezi virus, souris virus, Wenzhou virus, Big Brushy Tank virus, Catarina virus, Skinner Tank virus, Tonto Creek virus, Xapuri virus, or Junin virus.

[0151] In certain embodiments, provided herein is a nucleotide sequence comprising an open reading frame (ORF), wherein the ORF comprises a nucleotide sequence encoding
[0152] a) a functional fragment of a first polypeptide, and
[0153] b) a heterologous non-arenaviral polypeptide or a second polypeptide;
   wherein the ORF does not encode the full-length first polypeptide; and wherein the first and second polypeptides are different from each other and selected from the group consisting of arenavirus GP, NP, Z and L that are not from Lassa virus. In certain embodiments, the first and second polypeptides are selected from the group consisting of arenavirus GP, NP, Z and L of LCMV, Pichinde virus, Oliveros virus, Tamiami virus, Mobala virus, Mopeia virus, Ippy virus, Amapari virus, Flexal virus, Guanarito virus, Latino virus, Machupo virus, Parana virus, Pirital virus, Sabia virus, Tacaribe virus, Bear Canyon virus, Whitewater Arroyo virus, Allpahuayo virus (ALLV), Alxa virus, Chapare virus, Lijiang virus, Cupixi virus, Gairo virus, Loei River virus, Lujo virus, Luna virus, Luli virus, Lunk virus, Mariental virus, Merino Walk virus, Morogoro virus, Okahandja virus, Apore virus, Ryukyu virus, Solwezi virus, souris virus, Wenzhou virus, Big Brushy Tank virus, Catarina virus, Skinner Tank virus, Tonto Creek virus, Xapuri virus, or Junin virus.

[0154] In certain embodiments, the ORF is a first ORF and the nucleotide sequence further comprises a second ORF. In certain embodiments, the second ORF comprises a nucleotide sequence encoding a third polypeptide, a functional fragment of the first polypeptide, a functional fragment of a third polypeptide, or a second heterologous non-arenaviral polypeptide; wherein the third polypeptide is different from the first polypeptide and the second polypeptide and selected from the group consisting of arenavirus GP, NP, Z and L; wherein one of the two ORFs is in sense orientation and the other ORF is in antisense orientation; wherein the second ORF does not encode the full-length first polypeptide; wherein the second ORF does not encode the full-length third polypeptide; and wherein the heterologous non-arenaviral polypeptide and the second heterologous non-arenaviral polypeptide are the same or different from each other. In certain embodiments, the second ORF comprises a nucleotide sequence encoding a functional fragment of a first polypeptide, and wherein the functional fragment encoded by the first ORF is different from the functional fragment encoded by the second ORE.

[0155] In certain embodiments, the nucleotide sequence does not further comprise a second ORF.

[0156] In certain embodiments, the nucleotide sequence is an arenavirus genomic or antigenomic S segment. In certain embodiments, the nucleotide sequence is an arenavirus genomic or antigenomic L segment.

[0157] In certain embodiments, the first ORF is under control of an arenavirus 3′ UTR, and the second ORF is under control of an arenavirus 5′ UTR. In certain embodiments, the first ORF is under control of an arenavirus 5′ UTR, and the second ORF is under control of an arenavirus 3′ UTR.

[0158] In certain embodiments, the first ORF comprises a nucleotide sequence encoding arenavirus GP signal peptide and a buffer peptide, either alone or fused to a heterologous non-arenaviral polypeptide. In certain embodiments, the second ORF comprises a nucleotide sequence encoding a heterologous non-arenaviral signal peptide and the arenavirus GP1 and GP2. In certain embodiments, the second ORF comprises a nucleotide sequence encoding a heterologous non-arenaviral polypeptide; wherein the heterologous non-arenaviral polypeptide encoded by the first ORF and the heterologous non-arenaviral polypeptide encoded by the second ORF are the same or different from each other. In certain embodiments, the first ORF is under control of an arenavirus 3′ UTR and the second ORF is under control of an arenavirus 5′ UTR.

[0159] In certain embodiments, the first ORF comprises a nucleotide sequence encoding a heterologous non-arenaviral signal peptide and the arenavirus GP1 and GP2. In certain embodiments, the second ORF comprises a nucleotide sequence encoding NP. In certain embodiments, the first ORF is under control of an arenavirus 5′ UTR and the second ORF is under control of an arenavirus 3′ UTR.

[0160] In certain embodiments, provided herein is a nucleotide sequence comprising an open reading frame (ORF) that encodes a polypeptide comprising or consisting of an amino acid sequence that is at least 80%, 85%, 90%, 95%, 96%, 97%, 98%, 99% or 100% identical to a portion of the amino acid sequence of SEQ ID NO:1, SEQ ID NO:2, SEQ ID NO:3, SEQ ID NO:4, SEQ ID NO:5, SEQ ID NO:6, SEQ ID NO:48, SEQ ID NO:52, SEQ ID NO:59, SEQ ID NO:66, SEQ ID NO:73, SEQ ID NO:80, SEQ ID NO:84, SEQ ID NO:91, SEQ ID NO:98, SEQ ID NO:105, SEQ ID NO:109, SEQ ID NO:113, SEQ ID NO:120, SEQ ID NO:127, or SEQ ID NO:134. In certain embodiments, the nucleotide sequence comprising an open reading frame (ORF) that encodes a polypeptide comprising or consisting of an amino acid sequence that is at least 80% identical to a portion of the amino acid sequence of SEQ ID NO:1, SEQ ID NO:2, SEQ ID NO:3, SEQ ID NO:4, SEQ ID NO:5, SEQ ID NO:6, SEQ ID NO:48, SEQ ID NO:52, SEQ ID NO:59, SEQ ID NO:66, SEQ ID NO:73, SEQ ID NO:80, SEQ ID NO:84, SEQ ID NO:91, SEQ ID NO:98, SEQ ID NO:105, SEQ ID NO:109, SEQ ID NO:113, SEQ ID NO:120, SEQ ID NO:127, or SEQ ID NO:134. In certain embodiments, the nucleotide sequence comprising an open reading frame (ORF) that encodes a polypeptide comprising or consisting of an amino acid sequence that is at least 85% identical to a portion of the amino acid sequence of SEQ ID NO:1, SEQ ID NO:2, SEQ ID NO:3, SEQ ID NO:4, SEQ ID NO:5, SEQ ID NO:6, SEQ ID NO:48, SEQ ID NO:52, SEQ ID NO:59, SEQ ID NO:66, SEQ ID NO:73, SEQ ID NO:80, SEQ ID NO:84, SEQ ID NO:91, SEQ ID NO:98, SEQ ID NO:105, SEQ ID NO:109, SEQ ID NO:113, SEQ ID NO:120, SEQ ID NO:127, or SEQ ID NO:134. In certain embodiments, the nucleotide sequence comprising an open reading frame (ORF) that encodes a polypeptide comprising or consisting of an amino acid sequence that is at least 90% identical to a portion of the amino acid sequence of SEQ ID NO:1, SEQ ID NO:2, SEQ ID NO:3, SEQ ID NO:4, SEQ ID NO:5, SEQ ID NO:6, SEQ ID NO:48, SEQ ID NO:52, SEQ ID NO:59, SEQ ID NO:66, SEQ ID NO:73, SEQ ID NO:80, SEQ ID NO:84, SEQ ID NO:91, SEQ ID NO:98, SEQ ID NO:105, SEQ ID NO:109, SEQ ID NO:113, SEQ ID NO:120, SEQ ID NO:127, or SEQ ID NO:134. In certain embodiments, the nucleotide sequence comprising an open reading frame (ORF) encodes a polypeptide comprising or consisting of an amino acid sequence that is at least 95% identical to a portion of the amino acid sequence of SEQ ID NO:1, SEQ ID NO:2, SEQ ID NO:3, SEQ ID NO:4, SEQ ID NO:5, SEQ ID NO:6, SEQ ID NO:48, SEQ ID NO:52, SEQ ID NO:59, SEQ ID NO:66, SEQ ID NO:73, SEQ ID NO:80, SEQ ID NO:84, SEQ ID NO:91, SEQ ID NO:98, SEQ ID NO:105, SEQ ID NO:109, SEQ ID NO:113, SEQ ID NO:120, SEQ ID NO:127, or SEQ ID NO:134. In certain embodiments, the nucleotide sequence comprising an open reading frame (ORF) encodes a polypeptide comprising or consisting of an amino acid sequence that is at least 96% identical to a portion of the amino acid sequence of SEQ ID NO:1, SEQ ID NO:2, SEQ ID NO:3, SEQ ID NO:4, SEQ ID NO:5, SEQ ID NO:6, SEQ ID NO:48, SEQ ID NO:52, SEQ ID NO:59, SEQ ID NO:66, SEQ ID NO:73, SEQ ID NO:80, SEQ ID NO:84, SEQ ID NO:91, SEQ ID NO:98, SEQ ID NO:105, SEQ ID NO:109, SEQ ID NO:113, SEQ ID NO:120, SEQ ID NO:127, or SEQ ID NO:134. In certain embodiments, the nucleotide sequence comprising an open reading frame (ORF) encodes a polypeptide comprising or consisting of an amino acid sequence that is at least 97% identical to a portion of the amino acid sequence of SEQ ID NO:1, SEQ ID NO:2, SEQ ID NO:3, SEQ ID NO:4, SEQ ID NO:5, SEQ ID NO:6, SEQ ID NO:48, SEQ ID NO:52, SEQ ID NO:59, SEQ ID NO:66, SEQ ID NO:73, SEQ ID NO:80, SEQ ID NO:84, SEQ ID NO:91, SEQ ID NO:98, SEQ ID NO:105, SEQ ID NO:109, SEQ ID NO:113, SEQ ID NO:120, SEQ ID NO:127, or SEQ ID NO:134. In certain embodiments, the nucleotide sequence comprising an open reading frame (ORF) encodes a polypeptide comprising or consisting of an amino acid sequence that is at least 98% identical to a portion of the amino acid sequence of SEQ ID NO:1, SEQ ID NO:2, SEQ ID NO:3, SEQ ID NO:4, SEQ ID NO:5, SEQ ID NO:6, SEQ ID NO:48, SEQ ID NO:52, SEQ ID NO:59, SEQ ID NO:66, SEQ ID NO:73, SEQ ID NO:80, SEQ ID NO:84, SEQ ID NO:91, SEQ ID NO:98, SEQ ID NO:105, SEQ ID NO:109, SEQ ID NO:113, SEQ ID NO:120, SEQ ID NO:127, or SEQ ID NO:134. In certain embodiments, the nucleotide sequence comprising an open reading frame (ORF) encodes a polypeptide comprising or consisting of an amino acid sequence that is at least 99% identical to a portion of the amino acid sequence of SEQ ID NO:1, SEQ ID NO:2, SEQ ID NO:3, SEQ ID NO:4, SEQ ID NO:5, SEQ ID NO:6, SEQ ID NO:48, SEQ ID NO:52, SEQ ID NO:59, SEQ ID NO:66, SEQ ID NO:73, SEQ ID NO:80, SEQ ID NO:84, SEQ ID NO:91, SEQ ID NO:98, SEQ ID NO:105, SEQ ID NO:109, SEQ ID NO:113, SEQ ID NO:120, SEQ ID NO:127, or SEQ ID NO:134. In certain embodiments, the nucleotide sequence comprising an open reading frame (ORF) encodes a polypeptide comprising or consisting of an amino acid sequence that is 100% identical to a portion of the amino acid sequence of SEQ ID NO:1, SEQ ID NO:2, SEQ ID NO:3, SEQ ID NO:4, SEQ ID NO:5, SEQ ID NO:6, SEQ ID NO:48, SEQ ID NO:52, SEQ ID NO:59, SEQ ID NO:66, SEQ ID NO:73, SEQ ID NO:80, SEQ ID NO:84, SEQ ID NO:91, SEQ ID NO:98, SEQ ID NO:105, SEQ ID NO:109, SEQ ID NO:113, SEQ ID NO:120, SEQ ID NO:127, or SEQ ID NO:134. In some embodiments, the portion of the amino acid sequence is any portion of a sequence and can range in the number of amino acids. In some embodiments, the portion of the amino acid sequence is from about amino acid 1 to about amino acid 5, from about amino acid 1 to about amino acid 10, from about amino acid 1 to about amino acid 15, from about amino acid 1 to about amino acid 20, from about amino acid 1 to about amino acid 25, from about amino acid 1 to about amino acid 30, from about amino acid 1 to about amino acid 35, from about amino acid 1 to about amino acid 40, from about amino acid 1 to about amino acid 45, from about amino acid 1 to about amino acid 50, from about amino acid 1 to about amino acid 51, from about amino acid 1 to about amino acid 52, from about amino acid 1 to about amino acid 53, from about amino acid 1 to about amino acid 54, from about amino acid 1 to about amino acid 55, from about amino acid 1 to about amino acid 56, from about amino acid 1 to about amino acid 57, from about amino acid 1 to about amino acid 58, from about amino acid 1 to about amino acid 59, from about amino acid 1 to about amino acid 60, from about amino acid 1 to about amino acid 61, from about amino acid 1 to about amino acid 62, from about amino acid 1 to about amino acid 63, from about amino acid 1 to about amino acid 64, from about amino acid 1 to about amino acid 65, from about amino acid 1 to about amino acid 66, from about amino acid 1 to about amino acid 67, from about amino acid 1 to about amino acid 68, from about amino acid 1 to about amino acid 69, from about amino acid 1 to about amino acid 70, from about amino acid 1 to about amino acid 71, from about amino acid 1 to about amino acid 72, from about amino acid 1 to about amino acid 73, from about amino acid 1 to about amino acid 74, from about amino acid 1 to about amino acid 75, from about amino acid 1 to about amino acid 76, from about amino acid 1 to about amino acid 77, from about amino acid 1 to about amino acid 78, from about amino acid 1 to about amino acid 79, from about amino acid 1 to about amino acid 80, from about amino acid 1 to about amino acid 81, from about amino acid 1 to about amino acid 82, from about amino acid 1 to about amino acid 83, from about amino acid 1 to about amino acid 84, from about amino acid 1 to about amino acid 85, from about amino acid 1 to about amino acid 86, from about amino acid 1 to about amino acid 87, from about amino acid 1 to about amino acid 88, from about amino acid 1 to about amino acid 89, from about amino acid 1 to about amino acid 90, from about amino acid 1 to about amino acid 91, from about amino acid 1 to about amino acid 92, from about amino acid 1 to about amino acid 93, from about amino acid 1 to about amino acid 94, from about amino acid 1 to about amino acid 95, from about amino acid 1 to about amino acid 96, from about amino acid 1 to about amino acid 97, from about amino acid 1 to about amino acid 98, from about amino acid 1 to about amino acid 99, from about amino acid 1 to about amino acid 100, from about amino acid 1 to about amino acid 101, from about amino acid 1 to about amino acid 102, from about amino acid 1 to about amino acid 103, from about amino acid 1 to about amino acid 104, from about amino acid 1 to about amino acid 105, from about amino acid 1 to about amino acid 106, from about amino acid 1 to about amino acid 107, from about amino acid 1 to about amino acid 108, from about amino acid 1 to about amino acid 109, from about amino acid 1 to about amino acid 110, from about amino acid 1 to about amino acid 111, from about amino acid 1 to about amino acid 112, from about amino acid 1 to about amino acid 113, or from about amino acid 1 to about more than amino acid 114 (e.g., 115, 120, 125, 130, 135, 140, 145, 150, 200, 250, 300, etc.) of SEQ ID NO:1, SEQ ID NO:2, SEQ ID NO:3, SEQ ID NO:4, SEQ ID NO:5, SEQ ID NO:6, SEQ ID NO:48, SEQ ID NO:52, SEQ ID NO:59, SEQ ID NO:66, SEQ ID NO:73, SEQ ID NO:80, SEQ ID NO:84, SEQ ID NO:91, SEQ ID NO:98, SEQ ID NO:105, SEQ ID NO:109, SEQ ID NO:113, SEQ ID NO:120, SEQ ID NO:127, SEQ ID NO:134, or an arenavirus glycoprotein precursor sequence. In some embodiments, the portion of the amino acid sequence includes or is from about amino acid 1 to about amino acid 66 of SEQ ID NO:3. In some embodiments, the portion of the amino acid sequence includes or is from about amino acid 1 to about amino acid 81 of SEQ ID NO:3. In some embodiments, the portion of the amino acid sequence includes or is from about amino acid 1 to about amino acid 113 of SEQ ID NO:3.

[0161] In certain embodiments, the first polypeptide comprises an amino acid sequence that is at least 80%, 85%, 90%, 95%, 96%, 97%, 98%, 99% or 100% identical to the amino acid sequence of SEQ ID NO:1, SEQ ID NO:2, SEQ ID NO:3, SEQ ID NO:4, SEQ ID NO:5, SEQ ID NO:6, SEQ ID NO:7, SEQ ID NO:8, SEQ ID NO:9, SEQ ID NO:10, SEQ ID NO:11, SEQ ID NO:12, SEQ ID NO:13, SEQ ID NO:14, SEQ ID NO:15, SEQ ID NO:16, SEQ ID NO:17, SEQ ID NO:18, SEQ ID NO:19, SEQ ID NO:20, SEQ ID NO:21, SEQ ID NO:22, SEQ ID NO:23, SEQ ID NO:24, SEQ ID NO:48, SEQ ID NO:52, SEQ ID NO:59, SEQ ID NO:66, SEQ ID NO:73, SEQ ID NO:80, SEQ ID NO:84, SEQ ID NO:91, SEQ ID NO:98, SEQ ID NO:105, SEQ ID NO:109, SEQ ID NO:113, SEQ ID NO:120, SEQ ID NO:127, SEQ ID NO:134, SEQ ID NO:49, SEQ ID NO:56, SEQ ID NO:63, SEQ ID NO:70, SEQ ID NO:77, SEQ ID NO:81, SEQ ID NO:88, SEQ ID NO:95, SEQ ID NO:102, SEQ ID NO:106, SEQ ID NO:110, SEQ ID NO:117, SEQ ID NO:124, SEQ ID NO:131, SEQ ID NO:138, SEQ ID NO:50, SEQ ID NO:57, SEQ ID NO:64, SEQ ID NO:71, SEQ ID NO:78, SEQ ID NO:82, SEQ ID NO:89, SEQ ID NO:96, SEQ ID NO:103, SEQ ID NO:107, SEQ ID NO:111, SEQ ID NO:118, SEQ ID NO:125, SEQ ID NO:132, SEQ ID NO:139, SEQ ID NO:51, SEQ ID NO:58, SEQ ID NO:65, SEQ ID NO:72, SEQ ID NO:79, SEQ ID NO:83, SEQ ID NO:90, SEQ ID NO:97, SEQ ID NO:104, SEQ ID NO:108, SEQ ID NO:112, SEQ ID NO:119, SEQ ID NO:126, SEQ ID NO:133, or SEQ ID NO:140; and the second polypeptide comprises an amino acid sequence that is at least 80%, 85%, 90%, 95%, 96%, 97%, 98%, 99% or 100% identical to the amino acid sequence of SEQ ID NO:1, SEQ ID NO:2, SEQ ID NO:3, SEQ ID NO:4, SEQ ID NO:5, SEQ ID NO:6, SEQ ID NO:7, SEQ ID NO:8, SEQ ID NO:9, SEQ ID NO:10, SEQ ID NO:11, SEQ ID NO:12, SEQ ID NO:13, SEQ ID NO:14, SEQ ID NO:15, SEQ ID NO:16, SEQ ID NO:17, SEQ ID NO:18, SEQ ID NO:19, SEQ ID NO:20, SEQ ID NO:21, SEQ ID NO:22, SEQ ID NO:23, SEQ ID NO:24, SEQ ID NO:48, SEQ ID NO:52, SEQ ID NO:59, SEQ ID NO:66, SEQ ID NO:73, SEQ ID NO:80, SEQ ID NO:84, SEQ ID NO:91, SEQ ID NO:98, SEQ ID NO:105, SEQ ID NO:109, SEQ ID NO:113, SEQ ID NO:120, SEQ ID NO:127, SEQ ID NO:134, SEQ ID NO:49, SEQ ID NO:56, SEQ ID NO:63, SEQ ID NO:70, SEQ ID NO:77, SEQ ID NO:81, SEQ ID NO:88, SEQ ID NO:95, SEQ ID NO:102, SEQ ID NO: 106, SEQ ID NO:110, SEQ ID NO: 117, SEQ ID NO:124, SEQ ID NO:131, SEQ ID NO:138, SEQ ID NO:50, SEQ ID NO:57, SEQ ID NO:64, SEQ ID NO:71, SEQ ID NO:78, SEQ ID NO:82, SEQ ID NO:89, SEQ ID NO:96, SEQ ID NO:103, SEQ ID NO:107, SEQ ID NO:111, SEQ ID NO:118, SEQ ID NO:125, SEQ ID NO:132, SEQ ID NO:139, SEQ ID NO:51, SEQ ID NO:58, SEQ ID NO:65, SEQ ID NO:72, SEQ ID NO:79, SEQ ID NO:83, SEQ ID NO:90, SEQ ID NO:97, SEQ ID NO:104, SEQ ID NO:108, SEQ ID NO:112, SEQ ID NO:119, SEQ ID NO:126, SEQ ID NO:133, or SEQ ID NO:140; and wherein the third polypeptide comprises an amino acid sequence that is at least 80%, 85%, 90%, 95%, 96%, 97%, 98%, 99% or 100% identical to the amino acid sequence of SEQ ID NO:1, SEQ ID NO:2, SEQ ID NO:3, SEQ ID NO:4, SEQ ID NO:5, SEQ ID NO:6, SEQ ID NO:7, SEQ ID NO:8, SEQ ID NO:9, SEQ ID NO:10, SEQ ID NO:11, SEQ ID NO:12, SEQ ID NO:13, SEQ ID NO:14, SEQ ID NO:15, SEQ ID NO:16, SEQ ID NO:17, SEQ ID NO:18, SEQ ID NO:19, SEQ ID NO:20, SEQ ID NO:21, SEQ ID NO:22, SEQ ID NO:23, SEQ ID NO:24, SEQ ID NO:48, SEQ ID NO:52, SEQ ID NO:59, SEQ ID NO:66, SEQ ID NO:73, SEQ ID NO:80, SEQ ID NO:84, SEQ ID NO:91, SEQ ID NO:98, SEQ ID NO:105, SEQ ID NO:109, SEQ ID NO:113, SEQ ID NO:120, SEQ ID NO:127, SEQ ID NO:134, SEQ ID NO:49, SEQ ID NO:56, SEQ ID NO:63, SEQ ID NO:70, SEQ ID NO:77, SEQ ID NO:81, SEQ ID NO:88, SEQ ID NO:95, SEQ ID NO:102, SEQ ID NO:106, SEQ ID NO:110, SEQ ID NO:117, SEQ ID NO:124, SEQ ID NO:131, SEQ ID NO:138, SEQ ID NO:50, SEQ ID NO:57, SEQ ID NO:64, SEQ ID NO:71, SEQ ID NO:78, SEQ ID NO:82, SEQ ID NO:89, SEQ ID NO:96, SEQ ID NO:103, SEQ ID NO:107, SEQ ID NO:111, SEQ ID NO:118, SEQ ID NO:125, SEQ ID NO:132, SEQ ID NO:139, SEQ ID NO:51, SEQ ID NO:58, SEQ ID NO:65, SEQ ID NO:72, SEQ ID NO:79, SEQ ID NO:83, SEQ ID NO:90, SEQ ID NO:97, SEQ ID NO:104, SEQ ID NO:108, SEQ ID NO:112, SEQ ID NO: 119, SEQ ID NO:126, SEQ ID NO:133, or SEQ ID NO:140. In certain embodiments, the first polypeptide comprises an amino acid sequence identical to SEQ ID NO:1, SEQ ID NO:2, SEQ ID NO:3, SEQ ID NO:4, SEQ ID NO:5, SEQ ID NO:6, SEQ ID NO:48, SEQ ID NO:52, SEQ ID NO:59, SEQ ID NO:66, SEQ ID NO:73, SEQ ID NO:80, SEQ ID NO:84, SEQ ID NO:91, SEQ ID NO:98, SEQ ID NO:105, SEQ ID NO:109, SEQ ID NO:113, SEQ ID NO:120, SEQ ID NO:127, or SEQ ID NO:134.

[0162] In certain embodiments, the functional fragment of the first polypeptide comprises an amino acid sequence that is at least 80%, 85%, 90%, 95%, 96%, 97%, 98%, 99% or 100% identical to the amino acid sequence of SEQ ID NO:25, SEQ ID NO:26, SEQ ID NO:27, SEQ ID NO:28, SEQ ID NO:29, SEQ ID NO:30, SEQ ID NO:31, SEQ ID NO:32, SEQ ID NO:33, SEQ ID NO:142, SEQ ID NO:34, SEQ ID NO:35, SEQ ID NO:36, SEQ ID NO:37, SEQ ID NO:38, SEQ ID NO:39, SEQ ID NO:40, SEQ ID NO:41, SEQ ID NO:42, SEQ ID NO:53, SEQ ID NO:60, SEQ ID NO:67, SEQ ID NO:74, SEQ ID NO:85, SEQ ID NO:92, SEQ ID NO:99, SEQ ID NO: 114, SEQ ID NO:121, SEQ ID NO:128, SEQ ID NO:135, SEQ ID NO:54, SEQ ID NO:61, SEQ ID NO:68, SEQ ID NO:75, SEQ ID NO:86, SEQ ID NO:93, SEQ ID NO:100, SEQ ID NO: 115, SEQ ID NO:122, SEQ ID NO:129, SEQ ID NO:136, SEQ ID NO:55, SEQ ID NO:62, SEQ ID NO:69, SEQ ID NO:76, SEQ ID NO:87, SEQ ID NO:94, SEQ ID NO:101, SEQ ID NO: 116, SEQ ID NO:123, SEQ ID NO:130, SEQ ID NO:137, SEQ ID NO:149, SEQ ID NO:154, SEQ ID NO:161, SEQ ID NO:166, SEQ ID NO:136, SEQ ID NO:143, SEQ ID NO:144, SEQ ID NO: 147, SEQ ID NO:148, SEQ ID NO:152, SEQ ID NO:153, SEQ ID NO:158, SEQ ID NO:159, SEQ ID NO:160, SEQ ID NO:164, SEQ ID NO:165, SEQ ID NO:135, SEQ ID NO:141, SEQ ID NO:142, SEQ ID NO:145, SEQ ID NO:146, SEQ ID NO:150, SEQ ID NO:151, SEQ ID NO:155, SEQ ID NO:156, SEQ ID NO:157, SEQ ID NO:162, or SEQ ID NO: 163.

[0163] In certain embodiments, the functional fragment encoded by the first ORF or the second ORF is an arenavirus GP signal peptide and a buffer peptide, or a functional fragment thereof.

[0164] In certain embodiments, the heterologous non-arenaviral polypeptide, the second heterologous non-arenaviral polypeptide, or both heterologous non-arenaviral polypeptides are each an antigen derived from an infectious organism, tumor, or allergen. In certain embodiments, the antigen is selected from the group consisting of
[0165] (a) viral antigens, and the viral antigen is from a virus family selected from the group consisting of adenoviridae, herpesviridae, leviviridae, orthomyxoviridae, parvoviridae, filoviridae, hantaviridae, poxviridae, papillomaviridae, polyomaviridae, paramyxoviridae, pneumoviridae, picornaviridae, reoviridae, retroviridae, flaviviridae, hepadnaviridae, togaviridae, rhabdoviridae, arenaviridae, and coronaviridae;
[0166] (b) bacterial antigens, and the bacterial antigen is from a bacteria family selected from the group consisting of Aquaspirillum family, Azospirillum family, Azotobacteraceae family, Bacteroidaceae family, Bartonellaceae family, Bdellovibrio family, Campylobacteraceae family, Chlamydiaceae family, Clostridiaceae family, Enterobacteriaceae family, Gardinella family, Pasteurellaceae family, Halobacteriaceae family, Helicobacter family, Legionallaceae family, Listeriaceae family, Methylococcaceae family, mycobacteriaceae, Neisseriaceae family, Oceanospirillum family, Pasteurellaceae family, Streptococcaceae family, Pseudomonadaceae family, Rhizobiaceae family, Spirillum family, Spirosomaceae family, Staphylococcaceae family, Helicobacter family, Yersinia family, Bacillus antracis and Vampirovibrio family, and
[0167] (c) tumor neoantigens or neo-epitopes and tumor associated antigens; and the tumor associated antigen is selected from the group consisting of artificial fusion protein of HPV 16 E7 and E6 proteins, oncogenic viral antigens, cancer-testis antigens, oncofetal antigens, tissue differentiation antigens, mutant protein antigens, Adipophilin, AIM-2, ALDHIAI, BCLX (L), BING-4, CALCA, CD45, CPSF, cyclin DI, DKKI, ENAH (hMcna), Ga733 (EpCAM), EphA3, EZH2, FGF5, glypican-3, G250/MN/CAIX, HER-2/neu, IDOI, IGF2B3, IL13Ralpha2, Intestinal carboxyl esterase, alphafoetoprotein, Kallikrein 4, KIF20A, Lengsin, M-CSF, MCSP, mdm-2, Meloe, MMP-2, MMP-7, MUCI, MUC5AC, p53 (non-mutant), PAX5, PBF, PRAME, PSMA, RAGE, RAGE-I, RGS5, RhoC, RNF43, RU2AS, secernin 1, SOX10, STEAPI (six-transmembrane epithelial antigen of the prostate 1), survivin, Telomerase, VEGF, WT1, EGF-R, CEA, CD20, CD33, CD52, MELANA/MART1, MART2, NY-ESO-1, p53, MAGE A1, MAGE A3, MAGE-4, MAGE-5, MAGE-6, CDK4, alpha-actinin-4, ARTC1, BCR-ABL, BCR-ABL fusion protein (b3a2), B-RAF, CASP-5, CASP-8, beta-catenin, Cdc27, CDK4, CDKN2A, CLPP, COA-1, dek-can fusion protein, EFTUD2, Elongation factor 2, ETV6-AML, ETV6-AML1 fusion protein, FLT3-ITD, FNl, GPNMB, LDLR-fucosyltransferase fusion protein, NFYC, OGT, OS-9, pml-RARalpha fusion protein, PRDX5, PTPRK, H-ras, K-ras (V-Ki-ras2 Kirsten rat sarcoma viral oncogene), N-ras, RBAF600, SIRT2, SNRPD1, SSX, SSX2, SYT-SSXl or -SSX2 fusion protein, TGFbetaRII, Triosephosphate isomerase, ormdm-2, LMP2, HPV E6, HPV E7, EGFRvIII (epidermal growth factor variant III), Idiotype, GD2, ganglioside G2), Ras-mutant, p53 (mutant), Proteinase3 (PRI), Tyrosinase, PSA, hTERT, Sarcoma translocation breakpoints, EphA2, prostatic acid phosphatase PAP, neo-PAP, ML-IAP, AFP, ERG (TMPRSS2 ETS Fusion gene), NAI 7, PAX3, ALK, Androgen Receptor, Cyclin B1, Polysialic acid, MYCN, TRP2, TRP2-Int2, GD3, Fucosyl GMI, Mesothelin, PSCA, sLe(a), cyp1B1, PLACI, GM3, BORIS, Tn, GLoboH, NY-BR-I, SART3, STn, Carbonic Anhydrase IX, OY-TESI, Sperm protein 17, LCK, high molecular weight melanoma-associated antigen (HMWMAA), AKAP-4, SSX2, XAGE 1, B7H3, Legumain, Tie 2, Page4, VEGFR2, MAD-CT-I, FAP, PDGFR-beta, MADCT-2, For-related antigen 1, TRPI, GP100, CA-125, CA19-9, Calretinin, Epithelial membrane antigen (EMA), Epithelial tumor antigen (ETA), CD19, CD34, CD99, CDI 17, Chromogranin, Cytokeratin, Desmin, Glial fibrillary acidic protein (GFAP), gross cystic disease fluid protein (GCDFP-15), HMIB-45 antigen, Myo-D1, muscle-specific actin (MSA), neurofilament, neuronspecific enolase (NSE), placental alkaline phosphatase, synaptophysis, thyroglobulin, thyroid transcription factor-1, dimeric form of the pyruvate kinase isoenzyme type M2 (tumor M2-PK), BAGE BAGE-1, CAGE, CTAGE, FATE, GAGE, GAGE-I, GAGE-2, GAGE-3, GAGE-4, GAGE-5, GAGE-6, GAGE-7, HCA661, HOM-TES-85, MAGEA, MAGEB, MAGEC, NA88, NY-SAR-35, SPANXBI, SPAI 7, SSX, SYCP1, TPTE, Carbohydrate/ganglioside GM2 (oncofetal antigen-immunogenic-1 OFA-I-1), GM3, CA 15-3 (CA 27.29BCAA), CA 195, CA 242, CA 50, CAM 43, CEA, EBNA, EF2, Epstein-Barr virus antigen, HLA-A2, HLA-Al 1, HSP70-2, KIAAO205, MUM-I, MUM-2, MUM-3, Myosin class I, GnTV, Herv-K-mel, LAGE-I, LAGE-2, (sperm protein) SPI 7, SCP-I, P15(58), Hom/Mel-40, E2A-PRL, H4-RET, IGH-IGK, MYL-RAR, TSP-180, P185erbB2, p180erbB-3, c-met, nm-23H1, TAG-72, TAG-72-4, CA-72-4, CAM 17.1, NuMa, 13-catenin, P16, TAGE, CT7, 43-9F, 5T4, 791Tgp72, 13HCG, BCA225, BTAA, CD68KP1, CO-029, HTgp-175, M344, MG7-Ag, MOV18, NB70K, NYCO-1, RCAS1, SDCCAG16, TA-90, TAAL6, TLP, TPS, CD22, CD27, CD30, CD70, prostein, TARP (T cell receptor gamma alternate reading frame protein), Trp-p8, integrin αvβ3 (CD61), galactin, or Ral-B, CD123, CLL-1, CD38, CS-1, CD138, and ROR1.

[0168] In certain embodiments, the heterologous non-arenaviral polypeptide or the second heterologous non-arenaviral polypeptide is expressed under control of an arenavirus 3′ UTR; and the expression level of the heterologous non-arenaviral polypeptide or the expression level of the second heterologous non-arenaviral polypeptide is at least about 1%, 2%, 3%, 4%, 5%, 6%, 7%, 8%, 9%, 10%, 15%, 20%, 30%, 40%, 50%, 60%, 70%, 80%, 90%, 100%, 1.5-fold, 2-fold, 3-fold, 4-fold, 5-fold, 6-fold, 7-fold, 8-fold, 9-fold, 10-fold, 12-fold, 15-fold, 18-fold, 20-fold, 25-fold, or 30-fold higher than the expression level of the same heterologous non-arenaviral polypeptide expressed under control of the respective arenavirus 5′ UTR or higher than the expression level of the same second heterologous non-arenaviral polypeptide expressed under control of the respective arenavirus 5′ UTR.

[0169] In certain embodiments, one heterologous non-arenaviral polypeptide is expressed under control of an arenavirus 3′ UTR and the other heterologous non-arenaviral polypeptide is expressed under control of an arenavirus 5′ UTR. In certain embodiments, the combined expression level of both the heterologous non-arenaviral polypeptides is at least about 1%, 2%, 3%, 4%, 5%, 6%, 7%, 8%, 9%, 10%, 15%, 20%, 30%, 40%, 5%, ⁶50%, 70%, 80%, 90%, 100%, 1.5-fold, 2-fold, 3-fold, 4-fold, 5-fold, 6-fold, 7-fold, 8-fold, 9-fold, 10-fold, 12-fold, 15-fold, 18-fold, 20-fold, 25-fold, or 30-fold higher than the combined expression level of both the heterologous non-arenaviral polypeptides expressed under control of arenavirus 5′ UTRs.

[0170] In certain embodiments, one heterologous non-arenaviral polypeptide is expressed under control of an arenavirus 3′ UTR and the other heterologous non-arenaviral polypeptide is expressed under control of an arenavirus 5′ UTR. In certain embodiments, the heterologous non-arenaviral polypeptide is expressed under control of an arenavirus 3′ UTR and the second heterologous non-arenaviral polypeptide is expressed under control of an arenavirus 5′ UTR. In certain embodiments, the heterologous non-arenaviral polypeptide is expressed under control of an arenavirus 5′ UTR and the second heterologous non-arenaviral polypeptide is expressed under control of an arenavirus 3′ UTR. In certain embodiments, the combined expression level of both the heterologous non-arenaviral polypeptide and the second heterologous non-arenaviral polypeptide is at least about 1%, 2%, 3%, 4%, 5%, 6%, 7%, 8%, 9%, 10%, 15%, 20%, 30%, 40%, 50%, 60%, 70%, 80%, 90%, 100%, 1.5-fold, 2-fold, 3-fold, 4-fold, 5-fold, 6-fold, 7-fold, 8-fold, 9-fold, 10-fold, 12-fold, 15-fold, 18-fold, 20-fold, 25-fold, or 30-fold higher than the combined expression level of both the same heterologous non-arenaviral polypeptide and the same second heterologous non-arenaviral polypeptide expressed under control of arenavirus 5′ UTRs (i.e., the same heterologous non-arenaviral polypeptide is expressed under control of an arenavirus 5′ UTR and the same second heterologous non-arenaviral polypeptide is expressed under control of an arenavirus 5′ UTR).

[0171] In certain embodiments, one heterologous non-arenaviral polypeptide is expressed under control of an arenavirus 3′ UTR and the other heterologous non-arenaviral polypeptide is expressed under control of an arenavirus 5′ UTR. In certain embodiments, the heterologous non-arenaviral polypeptide is expressed under control of an arenavirus 3′ UTR and the second heterologous non-arenaviral polypeptide is expressed under control of an arenavirus 5′ UTR. In certain embodiments, the proportion of cells that express both the heterologous non-arenaviral polypeptide and the second heterologous non-arenaviral polypeptide (e.g., cells that co-express the heterologous non-arenaviral polypeptide and the second heterologous non-arenaviral polypeptide) is at least about 1%, 2%, 3%, 4%, 5%, 6%, 7%, 8%, 9%, 10%, 15%, 20%, 30%, 40%, 50%, 60%, 70%, 80%, 90%, 100%, 1.5-fold, 2-fold, 3-fold, 4-fold, 5-fold, 6-fold, 7-fold, 8-fold, 9-fold, 10-fold, 12-fold, 15-fold, 18-fold, 20-fold, 25-fold, or 30-fold higher than the proportion of cells that express both the same heterologous non-arenaviral polypeptide and the same second heterologous non-arenaviral polypeptide expressed under control of arenavirus 5′ UTRs (i.e., the same heterologous non-arenaviral polypeptide is expressed under control of an arenavirus 5′ UTR and the same second heterologous non-arenaviral polypeptide is expressed under control of an arenavirus 5′ UTR). In some embodiments, the proportion of cells is determined after a population of cells are infected with an arenavirus of the present disclosure (e.g., one heterologous non-arenaviral polypeptide is expressed under control of an arenavirus 3′ UTR and the other heterologous non-arenaviral polypeptide is expressed under control of an arenavirus 5′ UTR). In some embodiments, the proportion of cells is determined after a population of cells are infected with another arenavirus (e.g., both heterologous non-arenaviral polypeptides expressed under control of an arenavirus 5′ UTR).

[0172] In certain embodiments, one heterologous non-arenaviral polypeptide is expressed under control of an arenavirus 5′ UTR and the other heterologous non-arenaviral polypeptide is expressed under control of an arenavirus 3′ UTR. In certain embodiments, the heterologous non-arenaviral polypeptide is expressed under control of an arenavirus 5′ UTR and the second heterologous non-arenaviral polypeptide is expressed under control of an arenavirus 3′ UTR. In certain embodiments, the heterologous non-arenaviral polypeptide is expressed under control of an arenavirus 5′ UTR in one S segment and the second heterologous non-arenaviral polypeptide is expressed under control of an arenavirus 3′ UTR in another S segment. In certain embodiments, the proportion of cells that express both the heterologous non-arenaviral polypeptide and the second heterologous non-arenaviral polypeptide (e.g., cells that co-express the heterologous non-arenaviral polypeptide and the second heterologous non-arenaviral polypeptide) is at least about 1%, 2%, 3%, 4%, 5%, 6%, 7%, 8%, 9%, 10%, 15%, 20%, 30%, 40%, 50%, 60%, 70%, 80%, 90%, 100%, 1.5-fold, 2-fold, 3-fold, 4-fold, 5-fold, 6-fold, 7-fold, 8-fold, 9-fold, 10-fold, 12-fold, 15-fold, 18-fold, 20-fold, 25-fold, or 30-fold higher than the proportion of cells that express both the same heterologous non-arenaviral polypeptide and the same second heterologous non-arenaviral polypeptide expressed under control of arenavirus 5′ UTRs (i.e., the same heterologous non-arenaviral polypeptide is expressed under control of an arenavirus 5′ UTR in one S segment and the same second heterologous non-arenaviral polypeptide is expressed under control of an arenavirus 5′ UTR in another S segment). In some embodiments, the proportion of cells is determined after a population of cells are infected with an arenavirus of the present disclosure (e.g., one heterologous non-arenaviral polypeptide is expressed under control of an arenavirus 3′ UTR and the other heterologous non-arenaviral polypeptide is expressed under control of an arenavirus 5′ UTR). In some embodiments, the proportion of cells is determined after a population of cells are infected with another arenavirus (e.g., both heterologous non-arenaviral polypeptides expressed under control of an arenavirus 5′ UTR).

[0173] In certain embodiments, the nucleotide sequence provided herein comprises a first open reading frame (ORF) and a second ORF, and one of the two ORFs is in sense orientation and the other ORF is in antisense orientation. In certain embodiments, the first ORF is in sense orientation and the second ORF is in antisense orientation. In other embodiments, the first ORF is in antisense orientation and the second ORF is in sense orientation. In certain embodiments, the first ORF and/or the second ORF is part of a transcription unit that further comprises another ORF, wherein the other ORF and each of the first ORF and/or the second ORF are separated by an internal ribosome entry site (IRES).

[0174] In certain embodiment, the functional fragment is encoded alone by the first ORF or the second ORF. In certain embodiments, the functional fragment is fused to a heterologous non-arenaviral polypeptide or a polypeptide selected from an arenavirus GP, NP, Z and L. In certain embodiment, the functional fragment is under control of an arenavirus 3′ UTR. In other embodiments, the functional fragment is under control of an arenavirus 5′ UTR. In certain embodiment, the functional fragment encoded by the first ORF is different from the functional fragment encoded by the second ORF.

[0175] In certain embodiments, the functional fragment encoded by the first ORF or the second ORF is arenavirus GP signal peptide and a buffer peptide. In certain embodiments, the arenavirus GP signal peptide and the buffer peptide are not fused to an arenavirus GP, NP, Z or L.

[0176] In certain embodiments, the nucleotide provided herein is an mRNA. In certain embodiments, the nucleotide provided herein is an mRNA comprising an internal ribosome entry site (IRES). In other embodiments, the nucleotide provided herein is a DNA. In certain embodiments, the nucleotide provided herein can be translated into a product, for example a polypeptide. In certain embodiments, the nucleotide provided herein is a DNA that can be transcribed to produce an arenavirus genomic or antigenomic RNA segment. In certain embodiments, the nucleotide sequence as described herein can be part of a DNA expression vector.

[0177] Non-limiting examples of the polypeptides encoded by the first and second ORFs are illustration in Table 1.

TABLE 1
Non-limiting examples of the polypeptides
encoded by the first and second ORFs.

| | 1^{st} ORF | | |
|---|---|---|---|
| | Functional | | |
| | fragment | | Functional |
| | of a first | | fragment |
| | polypeptide | | of a first |
| | and a heterologous | | polypeptide |
| | non-arenaviral | | and a third |
| | polypeptide | | polypeptide |
| | (fused | Functional | (fused |
| | together or | fragment | together or |
| | separated | of a first | separated |
| 2^{nd} ORF | by an IRES) | polypeptide | by an IRES) |
| Functional fragment | Exemplary | Exemplary | Exemplary |
| of a first polypeptide | combination | combination | combination |
| and a heterologous | | | |
| non-arenaviral | | | |
| polypeptide | | | |
| (fused together or | | | |
| separated by an | | | |
| IRES) | | | |
| Functional fragment | Exemplary | Exemplary | Exemplary |
| of a first polypeptide | combination | combination | combination |
| Functional fragment | Exemplary | Exemplary | Exemplary |
| of a first polypeptide | combination | combination | combination |
| and a third | | | |
| polypeptide | | | |
| (fused together or | | | |
| separated by an | | | |
| IRES) | | | |
| A heterologous non- | Exemplary | Exemplary | Exemplary |
| arenaviral | combination | combination | combination |
| polypeptide | | | |
| A second | Exemplary | Exemplary | Exemplary |
| polypeptide | combination | combination | combination |
| Functional fragment | Exemplary | Exemplary | Exemplary |
| of a second | combination | combination | combination |
| polypeptide and a | | | |
| heterologous non- | | | |
| arenaviral | | | |
| polypeptide | | | |
| (fused together or | | | |
| separated by an | | | |
| IRES) | | | |
| Functional fragment | Exemplary | Exemplary | Exemplary |
| of a second | combination | combination | combination |
| polypeptide | | | |
| Functional fragment | Exemplary | Exemplary | Exemplary |
| of a second | combination | combination | combination |
| polypeptide and a | | | |
| third polypeptide | | | |
| (fused together or | | | |
| separated by an | | | |
| IRES) | | | |

[0178] In certain embodiments, the functional fragment is selected from the group consisting of arenavirus GP signal peptide, a buffer peptide, arenavirus GP1, and arenavirus GP2. Non-limiting examples of the polypeptides encoded by the first and second ORFs related to functional fragments of GP are illustrated in Table 2.

TABLE 2
Non-limiting examples of the polypeptides encoded by the first
and second ORFs related to functional fragments of GP.

| First ORF | Second ORF |
|---|---|
| GP signal peptide, a buffer peptide, and a | A heterologous non-arenaviral signal |
| heterologous non-arenaviral polypeptide | peptide, arenavirus GP1, and arenavirus |
| | GP2 |
| GP signal peptide, a buffer peptide, and a | A heterologous non-arenaviral polypeptide |
| heterologous non-arenaviral polypeptide | |
| GP signal peptide, a buffer peptide, and a | NP |
| heterologous non-arenaviral polypeptide | |
| GP signal peptide, a buffer peptide, and a | Z |
| heterologous non-arenaviral polypeptide | |
| GP signal peptide, a buffer peptide, and a | L |
| heterologous non-arenaviral polypeptide | |
| GP signal peptide, a buffer peptide, and a | No second ORF |
| heterologous non-arenaviral polypeptide | |
| GP signal peptide and a buffer peptide | A heterologous non-arenaviral signal |
| | peptide, arenavirus GP1, and arenavirus |
| | GP2 |
| GP signal peptide and a buffer peptide | A heterologous non-arenaviral polypeptide |
| GP signal peptide and a buffer peptide | NP |
| GP signal peptide and a buffer peptide | Z |
| GP signal peptide and a buffer peptide | L |
| GP signal peptide and a buffer peptide | No second ORF |
| GP signal peptide, a buffer peptide, and NP | A heterologous non-arenaviral signal |
| | peptide, arenavirus GP1, and arenavirus |
| | GP2 |
| GP signal peptide, a buffer peptide, and NP | A heterologous non-arenaviral polypeptide |
| GP signal peptide, a buffer peptide, and NP | Z |
| GP signal peptide, a buffer peptide, and NP | L |
| GP signal peptide, a buffer peptide, and NP | No second ORF |
| GP signal peptide, a buffer peptide, and Z | A heterologous non-arenaviral signal |
| | peptide, arenavirus GP1, and arenavirus |
| | GP2 |
| GP signal peptide, a buffer peptide, and Z | A heterologous non-arenaviral polypeptide |
| GP signal peptide, a buffer peptide, and Z | NP |
| GP signal peptide, a buffer peptide, and Z | L |
| GP signal peptide, a buffer peptide, and Z | No second ORF |
| GP signal peptide, a buffer peptide, and L | A heterologous non-arenaviral signal |
| | peptide, arenavirus GP1, and arenavirus |
| | GP2 |
| GP signal peptide, a buffer peptide, and L | A heterologous non-arenaviral polypeptide |
| GP signal peptide, a buffer peptide, and L | NP |
| GP signal peptide, a buffer peptide, and L | Z |
| GP signal peptide, a buffer peptide, and L | No second ORF |
| GP1, GP2 and a heterologous non- | GP signal peptide, a buffer peptide, and a |
| arenaviral signal peptide | heterologous non-arenaviral polypeptide |
| GP1, GP2 and a heterologous non- | GP signal peptide and a buffer peptide |
| arenaviral signal peptide | |
| GP1, GP2 and a heterologous non- | A heterologous non-arenaviral polypeptide |
| arenaviral signal peptide | |
| GP1, GP2 and a heterologous non- | NP |
| arenaviral signal peptide | |
| GP1, GP2 and a heterologous non- | Z |
| arenaviral signal peptide | |
| GP1, GP2 and a heterologous non- | L |
| arenaviral signal peptide | |
| GP1, GP2 and a heterologous non- | No second ORF |
| arenaviral signal peptide | |

### 5.5.1 Arenavirus Genomic or Antigenomic Segment Related to the Nucleotide Sequence Provided Herein

[0179] In certain embodiments, the nucleotide sequence provided herein is an arenavirus genomic or antigenomic segment. In certain embodiments, the nucleotide sequence is an arenavirus genomic or antigenomic S segment. In certain embodiments, the nucleotide sequence is an arenavirus genomic or antigenomic L segment. In certain embodiments, the nucleotide sequence provided herein can be derived from an arenavirus genomic or antigenomic segment.

[0180] In certain embodiments, the first ORF and the second ORF of the nucleotide sequence as described herein are in an S segment or derived from an S segment and separated by an arenavirus intergenic region (IGR). In certain embodiments, the first ORF and the second ORF of the nucleotide sequence as described herein are in an L segment or derived from an L segment and separated by an arenavirus intergenic region (IGR). In certain embodiments, the first ORF in an S segment is under control of an arenavirus 3′ untranslated region (UTR) whereas the second ORF in the S segment is under control of an arenavirus 5′ UTR. In certain embodiments, the first ORF in an L segment is under control of an arenavirus 3′ untranslated region (UTR) whereas the second ORF in the L segment is under control of an arenavirus 5′ UTR. In certain embodiments, the first ORF in an S segment is under control of an arenavirus 5′ UTR whereas the second ORF in the S segment is under control of an arenavirus 3′ UTR. In certain embodiments, the first ORF in an L segment is under control of an arenavirus 5′ UTR whereas the second ORF in the L segment is under control of an arenavirus 3′ UTR.

[0181] More details on the arenavirus genomic or antigenomic segment provided herein are described in Section 5.7.

### 5.5.2 Arenavirus Particles Comprising the Nucleotide Sequence Provided Herein

[0182] In certain embodiments, provided herein is an arenavirus particle containing a genome comprising the nucleotide sequence provided herein. In certain embodiments, the genome of the arenavirus particle consists of an S segment and an L segment.

[0183] In certain embodiments, the arenavirus particle is tri-segmented. In certain embodiments, the tri-segmented arenavirus particle comprises two S segments and an L segment. In certain embodiments, the tri-segmented arenavirus particle comprises an S segment and two L segments.

[0184] In certain embodiments, the genome of the arenavirus particle consists of
[0185] a) an S segment that encodes arenavirus GP signal peptide, a buffer peptide, and a heterologous non-arenaviral polypeptide or arenavirus GP signal peptide and a buffer peptide, alone under the control of an arenavirus 3′ UTR and a heterologous non-arenaviral signal peptide, arenavirus GP1 and arenavirus GP2 under the control of an arenavirus 5′ UTR;
[0186] b) an S segment that encodes NP under the control of an arenavirus 3′ UTR and another heterologous non-arenaviral polypeptide or no polypeptide under the control of an arenavirus 5′ UTR; and
[0187] c) an L segment that encodes L protein under the control of an arenavirus 3′ UTR and Z protein under the control of an arenavirus 5′ UTR; and wherein the two heterologous non-arenaviral polypeptides are the same or different from each other.

[0188] In certain embodiments, the genome of the arenavirus particle consists of
[0189] a) an S segment that encodes arenavirus GP signal peptide, a buffer peptide, and a heterologous non-arenaviral polypeptide or arenavirus GP signal peptide and a buffer peptide alone under the control of an arenavirus 3′ UTR and another heterologous non-arenaviral polypeptide or no polypeptide under the control of an arenavirus 5′ UTR;
[0190] b) an S segment that encodes NP under the control of an arenavirus 3′ UTR and a heterologous non-arenaviral signal peptide, arenavirus GP1 and arenavirus GP2 under the control of an arenavirus 5′ UTR; and
[0191] c) an L segment that encodes L protein under the control of an arenavirus 3′ UTR and Z protein under the control of an arenavirus 5′ UTR; and wherein the two heterologous non-arenaviral polypeptides are the same or different from each other.

[0192] In certain embodiments, the genome of the arenavirus particle consists of
[0193] a. an S segment that encodes (i) an arenavirus GP signal peptide, a buffer peptide, and a first heterologous non-arenaviral polypeptide or (ii) the arenavirus GP signal peptide and the buffer peptide under the control of an arenavirus genomic 3′ UTR and a heterologous non-arenaviral signal peptide, arenavirus GP1 and arenavirus GP2 under the control of an arenavirus genomic 5′ UTR;
[0194] b. an S segment that encodes NP under the control of an arenavirus genomic 3′ UTR and a second heterologous non-arenaviral polypeptide or no polypeptide under the control of an arenavirus genomic 5′ UTR; and
[0195] c. an L segment that encodes the L protein under the control of an arenavirus genomic 3′ UTR and the Z protein under the control of an arenavirus genomic 5′ UTR, wherein the first heterologous non-arenaviral polypeptide and the second heterologous non-arenaviral polypeptide are the same or different from each other.

[0196] In certain embodiments, the genome of the arenavirus particle consists of
[0197] a. an S segment that encodes (i) an arenavirus GP signal peptide, a buffer peptide, and a first heterologous non-arenaviral polypeptide or (ii) the arenavirus GP signal peptide and the buffer peptide under the control of an arenavirus genomic 3′ UTR and a second heterologous non-arenaviral polypeptide or no polypeptide under the control of an arenavirus genomic 5′ UTR;
[0198] b. an S segment that encodes NP under the control of an arenavirus genomic 3′ UTR and a heterologous non-arenaviral signal peptide, arenavirus GP1 and arenavirus GP2 under the control of an arenavirus genomic 5′ UTR; and
[0199] c. an L segment that encodes the L protein under the control of an arenavirus genomic 3′ UTR and the Z protein under the control of an arenavirus genomic 5′ UTR, wherein the first heterologous non-arenaviral polypeptide and the second heterologous non-arenaviral polypeptide are the same or different from each other.

[0200] In some embodiments, the GP signal peptide (or functional fragment thereof or polypeptide comprising the GP signal peptide or functional fragment thereof) is cleaved from the buffer peptide. In some embodiments, a peptidase can cleave the GP signal peptide (or functional fragment thereof or polypeptide comprising the GP signal peptide or functional fragment thereof) from the buffer peptide (eg, −5, −4, −3, −2, −1, +1, +2, +3, +4, or +5 amino acid position from the fusion site, or at the fusion site). In some embodiments, an arenavirus particle as described herein wherein the GP signal peptide is fused to a buffer peptide (i) grows to higher titers (e.g., by about or at least about 5%, 6%, 7%, 8%, 9%, 10%, 11%, 12%, 13%, 14%, 15%, 16%, 17%, 18%, 19%, 20%, 25%, 30%, 35%, 40%, 45%, 50%, 55%, 60%, 65%, 70%, 75%, 80%, 85%, 90%, 95%, 100%, or higher than about 100%), and/or (ii) reaches peak titers earlier (e.g., by about or at least about 1 hr, 5 hr, 10 hr, 12 hr, 14 hr, 20 hr, 24 hrs, 1 day, 2 days, 3 days, 4 days, 5 days, 6 days, 7 days, 1.5 weeks, 2 weeks, 2.5 weeks, 3 weeks, 3.5 weeks, 4 weeks, or more than about 4 weeks), and/or (iii) exhibits a higher rescue efficiency (i.e., higher percentage of RCV titer-positive rescues of total rescues) (e.g., higher by about or at least about 5%, 6%, 7%, 8%, 9%, 10%, 11%, 12%, 13%, 14%, 15%, 16%, 17%, 18%, 19%, 20%, 25%, 30%, 35%, 40%, 45%, 50%, 55%, 60%, 65%, 70%, 75%, 80%, 85%, 90%, 95%, 100%, or higher than about 100%), as compared to a control arenavirus particle that has the same genomic organization except it lacks a buffer peptide. In some embodiments, any native signal peptide of a heterologous non-arenaviral polypeptide (e.g., a first heterologous non-arenaviral polypeptide) has been removed.

[0201] In certain embodiments, the arenavirus particle is derived from an arenavirus of the New World Clade A. In certain embodiments, the arenavirus particle is derived from a Lassa virus. In certain embodiments, the arenavirus particle is derived from a Lymphocytic choriomeningitis virus (LCMV). In certain embodiments, the LCMV is a MP strain, a WE strain, an Armstrong strain, or an Armstrong Clone 13 strain. In certain embodiments, the arenavirus particle is derived from a Pichinde virus (PICV). In certain embodiments, the arenavirus particle is derived from a Junin virus vaccine Candid #1, or a Junin virus vaccine XJ Clone 3 strain. In certain embodiments, the arenavirus particle is derived from an Oliveros virus. In certain embodiments, the arenavirus particle is derived from a Tamiami virus. In certain embodiments, the arenavirus particle is derived from a Mobala virus. In certain embodiments, the arenavirus particle is derived from a Mopeia virus. In certain embodiments, the arenavirus particle is derived from an Ippy virus. In certain embodiments, the arenavirus particle is derived from an Amapari virus. In certain embodiments, the arenavirus particle is derived from a Flexal virus. In certain embodiments, the arenavirus particle is derived from a Guanarito virus. In certain embodiments, the arenavirus particle is derived from a Latino virus. In certain embodiments, the arenavirus particle is derived from a Machupo virus. In certain embodiments, the arenavirus particle is derived from a Parana virus. In certain embodiments, the arenavirus particle is derived from a Pirital virus. In certain embodiments, the arenavirus particle is derived from a Sabia virus. In certain embodiments, the arenavirus particle is derived from a Tacaribe virus. In certain embodiments, the arenavirus particle is derived from a Bear Canyon virus. In certain embodiments, the arenavirus particle is derived from a Whitewater Arroyo virus. In certain embodiments, the arenavirus particle is derived from an Allpahuayo virus (ALLV). In certain embodiments, the arenavirus particle is derived from an Alxa virus. In certain embodiments, the arenavirus particle is derived from a Chapare virus. In certain embodiments, the arenavirus particle is derived from a Lijiang virus. In certain embodiments, the arenavirus particle is derived from a Cupixi virus. In certain embodiments, the arenavirus particle is derived from a Gairo virus. In certain embodiments, the arenavirus particle is derived from a Loei River virus. In certain embodiments, the arenavirus particle is derived from a Lujo virus. In certain embodiments, the arenavirus particle is derived from a Luna virus. In certain embodiments, the arenavirus particle is derived from a Luli virus. In certain embodiments, the arenavirus particle is derived from a Lunk virus. In certain embodiments, the arenavirus particle is derived from a Mariental virus. In certain embodiments, the arenavirus particle is derived from a Merino Walk virus. In certain embodiments, the arenavirus particle is derived from a Morogoro virus. In certain embodiments, the arenavirus particle is derived from an Okahandja virus. In certain embodiments, the arenavirus particle is derived from an Apore virus. In certain embodiments, the arenavirus particle is derived from a Ryukyu virus. In certain embodiments, the arenavirus particle is derived from a Solwezi virus. In certain embodiments, the arenavirus particle is derived from a souris virus. In certain embodiments, the arenavirus particle is derived from a Wenzhou virus. In certain embodiments, the arenavirus particle is derived from a Big Brushy Tank virus. In certain embodiments, the arenavirus particle is derived from a Catarina virus. In certain embodiments, the arenavirus particle is derived from a Skinner Tank virus. In certain embodiments, the arenavirus particle is derived from a Tonto Creek virus. In certain embodiments, the arenavirus particle is derived from a Xapuri virus.

[0202] In certain embodiments, the genome of the arenavirus particle encodes the heterologous non-arenaviral polypeptide and/or the second heterologous non-arenaviral polypeptide, and the growth or infectivity of the arenavirus particle is not inferior to a second arenavirus particle, wherein the genome of the second arenavirus particle encodes the same heterologous non-arenaviral polypeptide and/or the same second heterologous non-arenaviral polypeptide; and wherein all arenaviral GP, NP, Z and L in the second arenavirus particle are each expressed as one ORF. In certain embodiments, the growth or infectivity of the arenavirus particle described herein is not inferior to a second arenavirus particle. In some embodiments, the genome of the second arenavirus particle does not encode a buffer peptide.

[0203] In certain embodiments, the arenavirus particle is infectious and replication competent. In certain embodiments, the arenavirus particle is attenuated as compared to its parental virus. In certain embodiments, the arenavirus particle is infectious but unable to produce further infectious progeny in non-complementing cells.

[0204] In certain embodiments, the titer of the arenavirus particle of the disclosure is at least about 1%, 2%, 3%, 4%, 5%, 6%, 7%, 8%, 9%, 10%, 15%, 20%, 30%, 40%, 50%, 60%, 70%, 80%, 90%, 100%, 1.5-fold, 2-fold, 3-fold, 4-fold, 5-fold, 6-fold, 7-fold, 8-fold, 9-fold, 10-fold, 12-fold, 15-fold, 18-fold, 20-fold, 25-fold, or 30-fold lower during a persistent infection in AGRAG mice than the titer of the respective wild-type parental arenavirus particle.

[0205] In certain embodiments, the arenavirus particle expresses a heterologous non-arenaviral polypeptide under control of an arenavirus 3′ UTR; wherein the arenavirus particle induces at least about 1%, 2%, 3%, 4%, 5%, 6%, 7%, 8%, 9%, 10%1, 15%, 20%, 30%, 40%, 50%, 60%, 70%, 80%, 90%, 100%, 1.5-fold, 2-fold, 3-fold, 4-fold, 5-fold, 6-fold, 7-fold, 8-fold, 9-fold, 10-fold, 12-fold, 15-fold, 18-fold, 20-fold, 25-fold, or 30-fold higher immune responses against the heterologous non-arenaviral polypeptide than another arenavirus particle expressing the same heterologous non-arenaviral polypeptide under control of an arenavirus 5′ UTR. In some embodiments, an immune response (e.g., a higher immune response) is obtained after an arenavirus particle of the present disclosure (e.g., arenavirus particle expressing a heterologous non-arenaviral polypeptide under control of an arenavirus 3′ UTR) is administered to a subject. In some embodiments, an immune response is obtained after an arenavirus particle expressing the heterologous non-arenaviral polypeptide under control of an arenavirus 5′ UTR is administered to a subject or to a comparable subject. In some embodiments, an immune response obtained after an arenavirus particle of the present disclosure is administered to a subject is compared to an immune response obtained after another arenavirus particle (e.g., arenavirus particle expressing the heterologous non-arenaviral polypeptide under control of an arenavirus 5′ UTR) is administered to a subject or to a comparable subject. In some embodiments, the subject and/or the comparable subject is a subject in need of treatment. In some embodiments, the subject and/or the comparable subject is a subject with a disease and/or with symptoms of a disease. In some embodiments, the comparable subject is a healthy subject. In some embodiments, the comparable subject is a subject without the disease. In some embodiments, the comparable subject is a subject not in need of treatment.

[0206] In certain embodiments, provided herein is an arenavirus particle comprising the nucleotide sequence provided herein. In certain embodiments, the arenavirus particle described herein is genetically stable. In certain embodiments, the arenavirus particle described herein provides high-level transgene expression. In certain embodiments, the arenavirus particle is bi-segmented, namely consists of two arenavirus genomic or antigenomic segments. In certain embodiments, the two arenavirus genomic or antigenomic segments are one S segment and one L segment. In certain embodiments, the arenavirus particle is tri-segmented, namely consists of three arenavirus genomic or antigenomic segments. In certain embodiments, the three arenavirus genomic or antigenomic segments are two S segments and one L segment. In other embodiments, the three arenavirus genomic or antigenomic segments are one S segment and two L segments. More details on the arenavirus genomic or antigenomic segment provided herein are described in Section 5.7.

### 5.5.3 Compositions and Methods Related to the Nucleotide Sequence Provided Herein

[0207] In certain embodiments, provided herein is a translation product of the nucleotide sequence provided herein.

[0208] In certain embodiments, the nucleotide sequence is a DNA sequence, which can be transcribed into an arenavirus genomic or antigenomic segment. In certain embodiments, provided herein is a method of producing an arenavirus genomic or antigenomic RNA segment, wherein the method comprises transcribing the DNA sequence provided herein.

[0209] In certain embodiments, provided herein is a method of generating an arenavirus particle, wherein the method comprises:
[0210] a) transfecting into a host cell one or more DNA sequences provided herein or one or more RNA sequences each transcribed in vitro from the DNA sequence provided herein;
[0211] b) transfecting into the host cell nucleotide sequences encoding arenavirus trans-acting factors;
[0212] c) maintaining the host cell under conditions suitable for virus formation; and
[0213] d) harvesting the arenavirus particle.

[0214] In certain embodiments, the one or more DNA sequences are transcribed using a bidirectional promoter. In certain embodiments, the one or more DNA sequences are transcribed under the control of a promoter selected from the group consisting of:
[0215] a) a RNA polymerase I promoter;
[0216] b) a RNA polymerase II promoter; and
[0217] c) a T7 promoter.

[0218] In certain embodiments, provided herein is a DNA expression vector comprising the nucleotide sequence provided herein.

[0219] In certain embodiments, provided herein is a method of rescuing an arenavirus particle using the nucleotide sequence provided herein.

[0220] In certain embodiments, provided herein is a host cell comprising the nucleotide sequence provided herein, the translation product provided herein, the arenavirus particle provided herein, or the DNA expression vector provided herein.

[0221] In certain embodiments, provided herein is a vaccine comprising the nucleotide sequence provided herein, the translation product provided herein, the arenavirus particle provided herein, and a pharmaceutically acceptable carrier.

[0222] In certain embodiments, provided herein is a pharmaceutical composition comprising the nucleotide sequence provided herein, the translation product provided herein, the arenavirus particle provided herein, and a pharmaceutically acceptable carrier.

### 5.6 Arenavirus Particle Provided Herein

[0223] In another aspect, provided herein are arenavirus particles. In certain embodiments, provided herein is an arenavirus particle engineered such that an arenaviral ORF is separated over two or more mRNA transcripts.

[0224] In certain embodiments, at least one of the mRNA transcripts comprises an internal ribosome entry site (IRES).

[0225] In certain embodiments, the mRNA transcripts can be transcribed from the arenavirus genomic or antigenomic segment. In certain embodiments, the arenavirus genomic or antigenomic segment is an S segment. In certain embodiments, the arenavirus genomic or antigenomic segment is an L segment.

[0226] In certain embodiments, the two or more mRNA transcripts are under control of an arenavirus 3′ UTR or an arenavirus 5′ UTR.

[0227] In certain embodiments, the arenaviral ORF encodes a polypeptide comprising an amino acid sequence that is at least 80%, 85%, 90%, 95%, 96%, 97%, 98%, 99% and 100% identical to the amino acid sequence of SEQ ID NO:1, SEQ ID NO:2, SEQ ID NO:3, SEQ ID NO:4, SEQ ID NO:5, SEQ ID NO:6, SEQ ID NO:7, SEQ ID NO:8, SEQ ID NO:9, SEQ ID NO:10, SEQ ID NO:11, SEQ ID NO:12, SEQ ID NO:13, SEQ ID NO:14, SEQ ID NO:15, SEQ ID NO:16, SEQ ID NO:17, SEQ ID NO:18, SEQ ID NO:19, SEQ ID NO:20, SEQ ID NO:21, SEQ ID NO:22, SEQ ID NO:23, SEQ ID NO:24, SEQ ID NO:48, SEQ ID NO:52, SEQ ID NO:59, SEQ ID NO:66, SEQ ID NO:73, SEQ ID NO:80, SEQ ID NO:84, SEQ ID NO:91, SEQ ID NO:98, SEQ ID NO:105, SEQ ID NO:109, SEQ ID NO:113, SEQ ID NO:120, SEQ ID NO:127, SEQ ID NO:134, SEQ ID NO:49, SEQ ID NO:56, SEQ ID NO:63, SEQ ID NO:70, SEQ ID NO:77, SEQ ID NO:81, SEQ ID NO:88, SEQ ID NO:95, SEQ ID NO:102, SEQ ID NO:106, SEQ ID NO:110, SEQ ID NO: 117, SEQ ID NO:124, SEQ ID NO:131, SEQ ID NO:138, SEQ ID NO:50, SEQ ID NO:57, SEQ ID NO:64, SEQ ID NO:71, SEQ ID NO:78, SEQ ID NO:82, SEQ ID NO:89, SEQ ID NO:96, SEQ ID NO:103, SEQ ID NO:107, SEQ ID NO:111, SEQ ID NO:118, SEQ ID NO:125, SEQ ID NO:132, SEQ ID NO:139, SEQ ID NO:51, SEQ ID NO:58, SEQ ID NO:65, SEQ ID NO:72, SEQ ID NO:79, SEQ ID NO:83, SEQ ID NO:90, SEQ ID NO:97, SEQ ID NO:104, SEQ ID NO:108, SEQ ID NO: 112, SEQ ID NO: 119, SEQ ID NO:126, SEQ ID NO:133, or SEQ ID NO:140. In certain embodiments, the arenaviral ORF encodes a polypeptide comprising an amino acid sequence that is identical to SEQ ID NO:1, SEQ ID NO:2, SEQ ID NO:3, SEQ ID NO:4, SEQ ID NO:5, SEQ ID NO:6, SEQ ID NO:48, SEQ ID NO:52, SEQ ID NO:59, SEQ ID NO:66, SEQ ID NO:73, SEQ ID NO:80, SEQ ID NO:84, SEQ ID NO:91, SEQ ID NO:98, SEQ ID NO:105, SEQ ID NO:109, SEQ ID NO:113, SEQ ID NO:120, SEQ ID NO:127, or SEQ ID NO:134.

[0228] In certain embodiments, the arenaviral ORF encodes arenavirus GP signal peptide and a buffer peptide, arenavirus GP1 and GP2 and the arenavirus GP signal peptide and a buffer peptide or a functional fragment thereof is expressed from a first mRNA transcript (e.g., viral mRNA transcript) and arenavirus GP1 and GP2 are expressed from a second mRNA transcript (e.g., viral mRNA transcript). In some embodiments, the GP signal peptide (or functional fragment thereof or polypeptide comprising the GP signal peptide or functional fragment thereof) is cleaved from the buffer peptide. In some embodiments, a peptidase can cleave the GP signal peptide (or functional fragment thereof or polypeptide comprising the GP signal peptide or functional fragment thereof) from the buffer peptide (eg, −5, −4, −3, −2, −1, +1, +2, +3, +4, or +5 amino acid position from the fusion site, or at the fusion site). In some embodiments, an arenavirus as described herein wherein the GP signal peptide is fused to a buffer peptide (i) grows to higher titers, and/or (ii) reaches peak titers earlier, and/or (iii) exhibits a higher rescue efficiency (i.e., higher percentage of RCV titer-positive rescues of total rescues), as compared to a control arenavirus that has the same genomic organization except it lacks a buffer peptide.

[0229] In certain embodiments, the first mRNA transcript is under control of an arenavirus 3′ UTR.

[0230] In certain embodiments, the second mRNA transcript further encodes a heterologous non-arenaviral signal peptide.

[0231] In certain embodiments, the heterologous non-arenaviral signal peptide is the signal peptide of the vesicular stomatitis virus serotype Indiana glycoprotein.

[0232] In certain embodiments, the first mRNA transcript further comprises a nucleotide sequence encoding a heterologous non-arenaviral polypeptide or arenavirus GP, NP, Z and L.

[0233] In certain embodiments, the heterologous non-arenaviral polypeptide is an antigen derived from an infectious organism, tumor, or allergen. In certain embodiments, the antigen is selected from the group consisting of
[0234] (a) viral antigens, and the viral antigen is from a virus family selected from the group consisting of adenoviridae, herpesviridae, leviviridae, orthomyxoviridae, parvoviridae, filoviridae, hantaviridae, poxviridae, papillomaviridae, polyomaviridae, paramyxoviridae, pneumoviridae, picornaviridae, reoviridae, retroviridae, flaviviridae, hepadnaviridae, togaviridae, rhabdoviridae, arenaviridae, and coronaviridae;
[0235] (b) bacterial antigens, and the bacterial antigen is from a bacteria family selected from the group consisting of Aquaspirillum family, Azospirillum family, Azotobacteraceae family, Bacteroidaceae family, Bartonellaceae family, Bdellovibrio family, Campylobacteraceae family, Chlamydiaceae family, Clostridiaceae family, Enterobacteriaceae family, Gardinella family, Pasteurellaceae family, Halobacteriaceae family, Helicobacter family, Legionallaceae family, Listeriaceae family, Methylococcaceae family, mycobacteriaceae, Neisseriaceae family, Oceanospirillum family, Pasteurellaceae family, Streptococcaceae family, Pseudomonadaceae family, Rhizobiaceae family, Spirillum family, Spirosomaceae family, Staphylococcaceae family, Helicobacter family, Yersinia family, Bacillus antracis and Vampirovibrio family, and
[0236] (c) tumor neoantigens or neo-epitopes and tumor associated antigens; and the tumor associated antigen is selected from the group consisting of artificial fusion protein of HPV 16 E7 and E6 proteins, oncogenic viral antigens, cancer-testis antigens, oncofetal antigens, tissue differentiation antigens, mutant protein antigens, Adipophilin, AIM-2, ALDHIAI, BCLX (L), BING-4, CALCA, CD45, CPSF, cyclin DI, DKKI, ENAH (hMcna), Ga733 (EpCAM), EphA3, EZH2, FGF5, glypican-3, G250/MN/CAIX, HER-2/neu, IDOI, IGF2B3, IL13Ralpha2, Intestinal carboxyl esterase, alphafoetoprotein, Kallikrein 4, KIF20A, Lengsin, M-CSF, MCSP, mdm-2, Meloe, MMP-2, MMP-7, MUCI, MUC5AC, p53 (non-mutant), PAX5, PBF, PRAME, PSMA, RAGE, RAGE-I, RGS5, RhoC, RNF43, RU2AS, secernin 1, SOX10, STEAPI (six-transmembrane epithelial antigen of the prostate 1), survivin, Telomerase, VEGF, WT1, EGF-R, CEA, CD20, CD33, CD52, MELANA/MART1, MART2, NY-ESO-1, p53, MAGE Al, MAGE A3, MAGE-4, MAGE-5, MAGE-6, CDK4, alpha-actinin-4, ARTC1, BCR-ABL, BCR-ABL fusion protein (b3a2), B-RAF, CASP-5, CASP-8, beta-catenin, Cdc27, CDK4, CDKN2A, CLPP, COA-1, dek-can fusion protein, EFTUD2, Elongation factor 2, ETV6-AML, ETV6-AML1 fusion protein, FLT3-ITD, FNl, GPNMB, LDLR-fucosyltransferase fusion protein, NFYC, OGT, OS-9, pml-RARalpha fusion protein, PRDX5, PTPRK, H-ras, K-ras (V-Ki-ras2 Kirsten rat sarcoma viral oncogene), N-ras, RBAF600, SIRT2, SNRPDl, SSX, SSX2, SYT-SSXl or -SSX2 fusion protein, TGFbetaRII, Triosephosphate isomerase, ormdm-2, LMP2, HPV E6, HPV E7, EGFRvIII (epidermal growth factor variant III), Idiotype, GD2, ganglioside G2), Ras-mutant, p53 (mutant), Proteinase3 (PRI), Tyrosinase, PSA, hTERT, Sarcoma translocation breakpoints, EphA2, prostatic acid phosphatase PAP, neo-PAP, ML-IAP, AFP, ERG (TMPRSS2 ETS Fusion gene), NAI 7, PAX3, ALK, Androgen Receptor, Cyclin B1, Polysialic acid, MYCN, TRP2, TRP2-Int2, GD3, Fucosyl GMI, Mesothelin, PSCA, sLe(a), cyp1B1, PLACI, GM3, BORIS, Tn, GLoboH, NY-BR-I, SART3, STn, Carbonic Anhydrase IX, OY-TESI, Sperm protein 17, LCK, high molecular weight melanoma-associated antigen (HMWMAA), AKAP-4, SSX2, XAGE 1, B7H3, Legumain, Tie 2, Page4, VEGFR2, MAD-CT-I, FAP, PDGFR-beta, MADCT-2, For-related antigen 1, TRPI, GP100, CA-125, CA19-9, Calretinin, Epithelial membrane antigen (EMA), Epithelial tumor antigen (ETA), CD19, CD34, CD99, CDI 17, Chromogranin, Cytokeratin, Desmin, Glial fibrillary acidic protein (GFAP), gross cystic disease fluid protein (GCDFP-15), HMIB-45 antigen, Myo-D1, muscle-specific actin (MSA), neurofilament, neuronspecific enolase (NSE), placental alkaline phosphatase, synaptophysis, thyroglobulin, thyroid transcription factor-1, dimeric form of the pyruvate kinase isoenzyme type M2 (tumor M2-PK), BAGE BAGE-1, CAGE, CTAGE, FATE, GAGE, GAGE-I, GAGE-2, GAGE-3, GAGE-4, GAGE-5, GAGE-6, GAGE-7, HCA661, HOM-TES-85, MAGEA, MAGEB, MAGEC, NA88, NY-SAR-35, SPANXBI, SPAI 7, SSX, SYCP1, TPTE, Carbohydrate/ganglioside GM2 (oncofetal antigen-immunogenic-1 OFA-I-1), GM3, CA 15-3 (CA 27.29BCAA), CA 195, CA 242, CA 50, CAM 43, CEA, EBNA, EF2, Epstein-Barr virus antigen, HLA-A2, HLA-Al 1, HSP70-2, KIAAO205, MUM-I, MUM-2, MUM-3, Myosin class I, GnTV, Herv-K-mel, LAGE-I, LAGE-2, (sperm protein) SPI 7, SCP-I, P15(58), Hom/Mel-40, E2A-PRL, H4-RET, IGH-IGK, MYL-RAR, TSP-180, P185erbB2, p180erbB-3, c-met, nm-23H1, TAG-72, TAG-72-4, CA-72-4, CAM 17.1, NuMa, 13-catenin, P16, TAGE, CT7, 43-9F, 5T4, 791Tgp72, 13HCG, BCA225, BTAA, CD68KP1, CO-029, HTgp-175, M344, MG7-Ag, MOV18, NB70K, NYCO-1, RCAS1, SDCCAG16, TA-90, TAAL6, TLP, TPS, CD22, CD27, CD30, CD70, prostein, TARP (T cell receptor gamma alternate reading frame protein), Trp-p8, integrin αvβ3 (CD61), galactin, or Ral-B, CD123, CLL-1, CD38, CS-1, CD138, and ROR1.

[0237] In certain embodiments, the expression level of the heterologous non-arenaviral polypeptide expressed under control of an arenavirus 3′ UTR is at least about 1%, 2%, 3%, 4%, 5%, 6%, 7%, 8%, 9%, 10%, 15%, 20%, 30%, 40%, 50%, 60%, 70%, 80%, 90%, 100%, 1.5-fold, 2-fold, 3-fold, 4-fold, 5-fold, 6-fold, 7-fold, 8-fold, 9-fold, 10-fold, 12-fold, 15-fold, 18-fold, 20-fold, 25-fold, or 30-fold higher than the expression level of the same heterologous non-arenaviral polypeptide expressed under control of the respective arenavirus 5′ UTR. In certain embodiments, at least about, or about, 5%, 10%, 15%, 20%, 25%, 30%, 35%, 40%, 45%, 50%, 55%, 60%, 65%, 70%, 75%, 80%, 85%, 90%, 95%, 99%, or 100% of cells express a heterologous non-arenaviral polypeptide after an arenavirus particle of the present disclosure (e.g., an arenavirus expressing a heterologous non-arenaviral polypeptide under control of an arenavirus 3′ UTR) is introduced to (or infects) the cells (e.g., to a population of cells). In certain embodiments, the proportion of cells that express a heterologous non-arenaviral polypeptide after an arenavirus particle of the present disclosure (e.g., expressing a heterologous non-arenaviral polypeptide under control of an arenavirus 3′ UTR) is introduced to (or infects) a population of cells is higher compared to the proportion of cells that express the heterologous non-arenaviral polypeptide after an arenavirus particle expressing the same heterologous non-arenaviral polypeptide expressed under control of an arenavirus 5′ UTR is introduced to (or infects) a population of cells. In certain embodiments, at least about 1%, 2%, 3%, 4%, 5%, 6%, 7%, 8%, 9%, 10%, 15%, 20%, 25%, 30%, 35%, 40%, 45%, 50%, 55%, 60%, 65%, 70%, 75%, 80%, 85%, 90%, 95%, 99%, or 100% more cells express a heterologous non-arenaviral polypeptide after an arenavirus particle of the present disclosure (e.g., expressing a heterologous non-arenaviral polypeptide under control of an arenavirus 3′ UTR) is introduced to (or infects) a population of cells as compared to the proportion of cells that express the heterologous non-arenaviral polypeptides after an arenavirus particle expressing the same heterologous non-arenaviral polypeptide under control of an arenavirus 5′ UTR is introduced to (or infects) a comparable population of cells. In certain embodiments, the cells are from a biological sample from a subject. In certain embodiments, the biological sample is from an organ (e.g., spleen). In certain embodiments, the biological sample is a blood sample.

[0238] In certain embodiments, the expression level of a heterologous non-arenaviral polypeptide expressed under control of an arenavirus 3′ UTR and/or the expression level of a second heterologous non-arenaviral polypeptide expressed under control of an arenavirus 3′ UTR is at least about 1%, 2%, 3%, 4%, 5%, 6%, 7%, 8%, 9%, 10%, 15%, 20%, 30%, 40%, 50%, 60%, 70%, 80%, 90%, 100%, 1.5-fold, 2-fold, 3-fold, 4-fold, 5-fold, 6-fold, 7-fold, 8-fold, 9-fold, 10-fold, 12-fold, 15-fold, 18-fold, 20-fold, 25-fold, or 30-fold higher than the expression level of the same heterologous non-arenaviral polypeptide expressed under control of the respective arenavirus 5′ UTR and/or higher than the expression level of the same second heterologous non-arenaviral polypeptide expressed under control of the respective arenavirus 5′ UTR. In certain embodiments, at least about, or about, 5%, 10%, 15%, 20%, 25%, 30%, 35%, 40%, 45%, 50%, 55%, 60%, 65%, 70%, 75%, 80%, 85%, 90%, 95%, 99%, or 100% of cells express the heterologous non-arenaviral polypeptide under control of an arenavirus 3′ UTR and/or express the second heterologous non-arenaviral polypeptide under control of an arenavirus 3′ UTR after an arenavirus particle of the present disclosure (e.g., an arenavirus expressing the heterologous non-arenaviral polypeptide under control of an arenavirus 3′ UTR and/or an arenavirus expressing the second heterologous non-arenaviral polypeptide under control of an arenavirus 3′ UTR) is introduced to (or infects) the cells (e.g., to a population of cells). In certain embodiments, the proportion of cells that express the heterologous non-arenaviral polypeptide and/or express the second heterologous non-arenaviral polypeptide after an arenavirus particle of the present disclosure (e.g., expressing the heterologous non-arenaviral polypeptide under control of an arenavirus 3′ UTR and/or expressing the second heterologous non-arenaviral polypeptide under control of an arenavirus 3′ UTR) is introduced to (or infects) a population of cells is higher compared to the proportion of cells that express the heterologous non-arenaviral polypeptide and/or express the second heterologous non-arenaviral polypeptide after an arenavirus particle expressing the same heterologous non-arenaviral polypeptide under control of an arenavirus 5′ UTR and/or expressing the same second heterologous non-arenaviral polypeptide under control of an arenavirus 5′ UTR is introduced to (or infects) a population of cells. In certain embodiments, at least about 1%, 2%, 3%, 4%, 5%, 6%, 7%, 8%, 9%, 10%1, 15%, 20%, 25%, 30%, 35%, 40%, 45%, 50%, 55%, 60%, 65%, 70%, 75%, 80%, 85%, 90%, 95%, 99%, or 100% more cells express the heterologous non-arenaviral polypeptide and/or express the second heterologous non-arenaviral polypeptide after an arenavirus particle of the present disclosure (e.g., expressing the heterologous non-arenaviral polypeptide under control of an arenavirus 3′ UTR and/or expressing the second heterologous non-arenaviral polypeptide under control of an arenavirus 3′ UTR) is introduced to (or infects) a population of cells as compared to the proportion (or amount) of cells that express the heterologous non-arenaviral polypeptides and/or express the second heterologous non-arenaviral polypeptides after an arenavirus particle expressing the same heterologous non-arenaviral polypeptide under control of an arenavirus 5′ UTR and/or expressing the same second heterologous non-arenaviral polypeptide under control of an arenavirus 5′ UTR is introduced to (or infects) a comparable population of cells. In certain embodiments, the cells are from a biological sample from a subject. In certain embodiments, the biological sample is from an organ (e.g., spleen). In certain embodiments, the biological sample is a blood sample.

[0239] In certain embodiments, the arenavirus particle expresses two heterologous non-arenaviral polypeptides. In certain embodiments, the expression of a first of the two heterologous non-arenaviral polypeptides is under control of an arenavirus 3′ UTR in a first S segment and the expression of a second of the two heterologous non-arenaviral polypeptides is under control of an arenavirus 5′ UTR in a second S segment. In certain embodiments, the expression of a first of the two heterologous non-arenaviral polypeptides is under control of an arenavirus 5′ UTR in a first S segment and the expression of a second of the two heterologous non-arenaviral polypeptides is under control of an arenavirus 3′ UTR in a second S segment. In certain embodiments, the combined expression level of the two heterologous non-arenaviral polypeptides is at least about, or about 1%, 2%, 3%, 4%, 5%, 6%, 7%, 8%, 9%, 10%, 15%, 20%, 30%, 40%, 50%, 60%, 70%, 80%, 90%, 100%, 1.5-fold, 2-fold, 3-fold, 4-fold, 5-fold, 6-fold, 7-fold, 8-fold, 9-fold, 10-fold, 12-fold, 15-fold, 18-fold, 20-fold, 25-fold, or 30-fold higher than the combined expression level of the same two heterologous non-arenaviral polypeptide expressed under control of arenavirus 5′ UTRs. In certain embodiments, the expression of a first of the same two heterologous non-arenaviral polypeptides is under control of an arenavirus 5′ UTR in a first S segment and the expression of a second of the same two heterologous non-arenaviral polypeptides is under control of an arenavirus 5′ UTR in a second S segment.

[0240] In certain embodiments, one heterologous non-arenaviral polypeptide is expressed under control of an arenavirus 3′ UTR and the other heterologous non-arenaviral polypeptide is expressed under control of an arenavirus 5′ UTR. In certain embodiments, the heterologous non-arenaviral polypeptide is expressed under control of an arenavirus 3′ UTR and the second heterologous non-arenaviral polypeptide is expressed under control of an arenavirus 5′ UTR. In certain embodiments, the heterologous non-arenaviral polypeptide is expressed under control of an arenavirus 3′ UTR in one S segment and the second heterologous non-arenaviral polypeptide is expressed under control of an arenavirus 5′ UTR in another S segment. In certain embodiments, the heterologous non-arenaviral polypeptide is expressed under control of an arenavirus 5′ UTR in one S segment and the second heterologous non-arenaviral polypeptide is expressed under control of an arenavirus 3′ UTR in another S segment. In certain embodiments, the proportion of cells that express both the heterologous non-arenaviral polypeptide and the second heterologous non-arenaviral polypeptide (e.g., cells that co-express the heterologous non-arenaviral polypeptide and the second heterologous non-arenaviral polypeptide) is at least about 1%, 2%, 3%, 4%, 5%, 6%, 7%, 8%, 9%, 10%, 15%, 20%, 30%, 40%, 50%, 60%, 70%, 80%, 90%, 100%, 1.5-fold, 2-fold, 3-fold, 4-fold, 5-fold, 6-fold, 7-fold, 8-fold, 9-fold, 10-fold, 12-fold, 15-fold, 18-fold, 20-fold, 25-fold, or 30-fold higher than the proportion of cells that express both the same heterologous non-arenaviral polypeptide and the same second heterologous non-arenaviral polypeptide expressed under control of arenavirus 5′ UTRs (i.e., the same heterologous non-arenaviral polypeptide is expressed under control of an arenavirus 5′ UTR in one S segment and the same second heterologous non-arenaviral polypeptide is expressed under control of an arenavirus 5′ UTR in another S segment). In some embodiments, the proportion of cells is determined after a population of cells are infected with an arenavirus of the present disclosure (e.g., one heterologous non-arenaviral polypeptide is expressed under control of an arenavirus 3′ UTR and the other heterologous non-arenaviral polypeptide is expressed under control of an arenavirus 5′ UTR). In some embodiments, the proportion of cells is determined after a population of cells are infected with another arenavirus (e.g., both heterologous non-arenaviral polypeptides expressed under control of an arenavirus 5′ UTR).

[0241] In certain embodiments, at least about, or about, 5%, 10%, 15%, 20%, 25%, 30%, 35%, 40%, 45%, 50%, 55%, 60%, 65%, 70%, 75%, 80%, 8% 5, ⁹ 0, 95% 99%, or 100% of cells express (e.g., co-express) the two heterologous non-arenaviral polypeptides after an arenavirus particle of the present disclosure (e.g., expressing one heterologous non-arenaviral polypeptide under control of an arenavirus 3′ UTR in one S segment and expressing another heterologous non-arenaviral polypeptide under control of an arenavirus 5′ UTR in another S segment) is introduced to (or infects) the cells (e.g., to a population of cells). In certain embodiments, the proportion of cells that express (e.g., co-express) the two heterologous non-arenaviral polypeptides after an arenavirus particle of the present disclosure (e.g., expressing one heterologous non-arenaviral polypeptide under control of an arenavirus 3′ UTR in one S segment and expressing another heterologous non-arenaviral polypeptide under control of an arenavirus 5′ UTR in another S segment) is introduced to (or infects) a population of cells is higher as compared to the proportion of cells that express (e.g., co-express) the two heterologous non-arenaviral polypeptides after an arenavirus particle expressing the same two heterologous non-arenaviral polypeptides under control of arenavirus 5′ UTRs (e.g., expressing one heterologous non-arenaviral polypeptide under control of an arenavirus 5′ UTR of one S segment and expressing the other heterologous non-arenaviral polypeptide under control of an arenavirus 5′ UTR of the other S segment) is introduced to (or infects) a population of cells. In certain embodiments, at least about 1%, 2%, 3%, 4%, 5%, 6%, 7%, 8%, 9%0, 10%, 15%, 20%, 25%, 30%, 35%, 40%, 45%, 50%, 55%, 60%, 65%, 70%, 75%, 80%, 85%, 90%, 95%, 99%, or 100% more cells express (e.g., co-express) the two heterologous non-arenaviral polypeptides after an arenavirus particle of the present disclosure (e.g., expressing one heterologous non-arenaviral polypeptide under control of an arenavirus 3′ UTR in one S segment and expressing another heterologous non-arenaviral polypeptide under control of an arenavirus 5′ UTR in another S segment) is introduced to (or infects) a population of cells as compared to the proportion (or amount) of cells that express (e.g., co-express) the two heterologous non-arenaviral polypeptides after an arenavirus particle expressing the same two heterologous non-arenaviral polypeptides under control of arenavirus 5′ UTRs (e.g., expressing one heterologous non-arenaviral polypeptide under control of an arenavirus 5′ UTR of one S segment and expressing the other heterologous non-arenaviral polypeptide under control of an arenavirus 5′ UTR of the other S segment) is introduced to (or infects) a comparable population of cells.

[0242] In certain embodiments, the genome of the arenavirus particle encodes the heterologous non-arenaviral polypeptide and/or the second heterologous non-arenaviral polypeptide, and the growth or infectivity of the arenavirus particle is not inferior to a second arenavirus particle, wherein the genome of the second arenavirus particle encodes the same heterologous non-arenaviral polypeptide and/or the same second heterologous non-arenaviral polypeptide; and wherein all arenaviral GP, NP, Z and L in the second arenavirus particle are each expressed as one ORF. In some embodiments, the genome of the second arenavirus particle does not encode a buffer peptide.

[0243] In certain embodiments, the genome of the arenavirus particle consists of an S segment and an L segment.

[0244] In certain embodiments, the arenavirus particle is tri-segmented. In certain embodiments, the tri-segmented arenavirus particle comprises two S segments and an L segment. In certain embodiments, the tri-segmented arenavirus particle comprises an S segment and two L segments.

[0245] In certain embodiments, the arenavirus particle comprises a genome organization as outlined in FIG. 18C (with a buffer peptide). In certain embodiments, the arenavirus particle comprises a genome organization as outlined in FIG. 18E (with a buffer peptide). FIGS. 18C and 18E show a general genomic organization, and while the buffer peptide is not present in FIGS. 18C and 18E, a buffer peptide can be present following the GP signal peptide.

[0246] In certain embodiments, the genome of the arenavirus particle consists of
[0247] a) an S segment that encodes arenavirus GP signal peptide, a buffer peptide, and a heterologous non-arenaviral polypeptide or arenavirus GP signal peptide and a buffer peptide alone under the control of an arenavirus 3′ UTR and a heterologous non-arenaviral signal peptide, arenavirus GP1 and arenavirus GP2 under the control of an arenavirus 5′ UTR;
[0248] b) an S segment that encodes NP under the control of an arenavirus 3′ UTR and another heterologous non-arenaviral polypeptide or no polypeptide under the control of an arenavirus 5′ UTR; and
[0249] c) an L segment that encodes L protein under the control of an arenavirus 3′ UTR and Z protein under the control of an arenavirus 5′ UTR; and wherein the two heterologous non-arenaviral polypeptides are the same or different from each other.

[0250] In certain embodiments, the genome of the arenavirus particle consists of
[0251] a) an S segment that encodes arenavirus GP signal peptide, a buffer peptide, and a heterologous non-arenaviral polypeptide or arenavirus GP signal peptide and a buffer peptide alone under the control of an arenavirus 3′ UTR and another heterologous non-arenaviral polypeptide or no polypeptide under the control of an arenavirus 5′ UTR;
[0252] b) an S segment that encodes NP under the control of an arenavirus 3′ UTR and a heterologous non-arenaviral signal peptide, arenavirus GP1 and arenavirus GP2 under the control of an arenavirus 5′ UTR; and
[0253] c) an L segment that encodes L protein under the control of an arenavirus 3′ UTR and Z protein under the control of an arenavirus 5′ UTR; and wherein the two heterologous non-arenaviral polypeptides are the same or different from each other.

[0254] In certain embodiments, the genome of the arenavirus particle consists of
[0255] a) an S segment that encodes (i) an arenavirus GP signal peptide, a buffer peptide, and a first heterologous non-arenaviral polypeptide or (ii) the arenavirus GP signal peptide and the buffer peptide under the control of an arenavirus genomic 3′ UTR and a heterologous non-arenaviral signal peptide, arenavirus GP1 and arenavirus GP2 under the control of an arenavirus genomic 5′ UTR;
[0256] b) an S segment that encodes NP under the control of an arenavirus genomic 3′ UTR and a second heterologous non-arenaviral polypeptide or no polypeptide under the control of an arenavirus genomic 5′ UTR; and
[0257] c) an L segment that encodes the L protein under the control of an arenavirus genomic 3′ UTR and the Z protein under the control of an arenavirus genomic 5′ UTR; wherein the first heterologous non-arenaviral polypeptide and the second heterologous non-arenaviral polypeptide are the same or different from each other.

[0258] In certain embodiments, the genome of the arenavirus particle consists of
[0259] a) an S segment that encodes (i) an arenavirus GP signal peptide, a buffer peptide, and a first heterologous non-arenaviral polypeptide or (ii) the arenavirus GP signal peptide and the buffer peptide under the control of an arenavirus genomic 3′ UTR and a second heterologous non-arenaviral polypeptide or no polypeptide under the control of an arenavirus genomic 5′ UTR;
[0260] b) an S segment that encodes NP under the control of an arenavirus genomic 3′ UTR and a heterologous non-arenaviral signal peptide, arenavirus GP1 and arenavirus GP2 under the control of an arenavirus genomic 5′ UTR; and
[0261] c) an L segment that encodes the L protein under the control of an arenavirus genomic 3′ UTR and the Z protein under the control of an arenavirus genomic 5′ UTR; wherein the first heterologous non-arenaviral polypeptide and the second heterologous non-arenaviral polypeptide are the same or different from each other.

[0262] In certain embodiments, the arenavirus particle is derived from a Lassa virus. In certain embodiments, the arenavirus particle is derived from a Lymphocytic choriomeningitis virus (LCMV). In certain embodiments, the LCMV is a MP strain, a WE strain, an Armstrong strain, or an Armstrong Clone 13 strain. In certain embodiments, the arenavirus particle is derived from a Pichinde virus (PICV). In certain embodiments, the arenavirus particle is derived from a Junin virus vaccine Candid #1, or a Junin virus vaccine XJ Clone 3 strain. In certain embodiments, the arenavirus particle is derived from an Oliveros virus. In certain embodiments, the arenavirus particle is derived from a Tamiami virus. In certain embodiments, the arenavirus particle is derived from a Mobala virus. In certain embodiments, the arenavirus particle is derived from a Mopeia virus. In certain embodiments, the arenavirus particle is derived from an Ippy virus. In certain embodiments, the arenavirus particle is derived from an Amapari virus. In certain embodiments, the arenavirus particle is derived from a Flexal virus. In certain embodiments, the arenavirus particle is derived from a Guanarito virus. In certain embodiments, the arenavirus particle is derived from a Latino virus. In certain embodiments, the arenavirus particle is derived from a Machupo virus. In certain embodiments, the arenavirus particle is derived from a Parana virus. In certain embodiments, the arenavirus particle is derived from a Pirital virus. In certain embodiments, the arenavirus particle is derived from a Sabia virus. In certain embodiments, the arenavirus particle is derived from a Tacaribe virus. In certain embodiments, the arenavirus particle is derived from a Bear Canyon virus. In certain embodiments, the arenavirus particle is derived from a Whitewater Arroyo virus. In certain embodiments, the arenavirus particle is derived from an Allpahuayo virus (ALLV). In certain embodiments, the arenavirus particle is derived from an Alxa virus. In certain embodiments, the arenavirus particle is derived from a Chapare virus. In certain embodiments, the arenavirus particle is derived from a Lijiang virus. In certain embodiments, the arenavirus particle is derived from a Cupixi virus. In certain embodiments, the arenavirus particle is derived from a Gairo virus. In certain embodiments, the arenavirus particle is derived from a Loei River virus. In certain embodiments, the arenavirus particle is derived from a Lujo virus. In certain embodiments, the arenavirus particle is derived from a Luna virus. In certain embodiments, the arenavirus particle is derived from a Luli virus. In certain embodiments, the arenavirus particle is derived from a Lunk virus. In certain embodiments, the arenavirus particle is derived from a Mariental virus. In certain embodiments, the arenavirus particle is derived from a Merino Walk virus. In certain embodiments, the arenavirus particle is derived from a Morogoro virus. In certain embodiments, the arenavirus particle is derived from an Okahandja virus. In certain embodiments, the arenavirus particle is derived from an Apore virus. In certain embodiments, the arenavirus particle is derived from a Ryukyu virus. In certain embodiments, the arenavirus particle is derived from a Solwezi virus. In certain embodiments, the arenavirus particle is derived from a souris virus. In certain embodiments, the arenavirus particle is derived from a Wenzhou virus. In certain embodiments, the arenavirus particle is derived from a Big Brushy Tank virus. In certain embodiments, the arenavirus particle is derived from a Catarina virus. In certain embodiments, the arenavirus particle is derived from a Skinner Tank virus. In certain embodiments, the arenavirus particle is derived from a Tonto Creek virus. In certain embodiments, the arenavirus particle is derived from a Xapuri virus.

[0263] In certain embodiments, the arenavirus particle is infectious and replication competent. In certain embodiments, the arenavirus particle is attenuated as compared to its parental wild-type virus. In certain embodiments, the arenavirus particle is infectious but unable to produce further infectious progeny in non-complementing cells.

[0264] In certain embodiments, the titer of the arenavirus particle of the disclosure is at least about 1%, 2%, 3%, 4%, 5%, 6%, 7%, 8%, 9%, 10%, 15%, 20%, 30%, 40%, 50%, 60%, 70%, 80%, 90%, 100%, 1.5-fold, 2-fold, 3-fold, 4-fold, 5-fold, 6-fold, 7-fold, 8-fold, 9-fold, 10-fold, 12-fold, 15-fold, 18-fold, 20-fold, 25-fold, or 30-fold lower during a persistent infection in AGRAG mice than the titer of the respective wild-type parental arenavirus particle.

[0265] In certain embodiments, the arenavirus particle expresses a heterologous non-arenaviral polypeptide under control of an arenavirus 3′ UTR; wherein the arenavirus particle induces at least about 1%, 2%, 3%, 4%, 5%, 6%, 7%, 8%, 9%, 10%, 15%, 20%, 30%, 40%, 50%, 60%, 70%, 80%, 90%, 100%, 1.5-fold, 2-fold, 3-fold, 4-fold, 5-fold, 6-fold, 7-fold, 8-fold, 9-fold, 10-fold, 12-fold, 15-fold, 18-fold, 20-fold, 25-fold, or 30-fold higher immune responses against the heterologous non-arenaviral polypeptide than another arenavirus particle expressing the same heterologous non-arenaviral polypeptide under control of an arenavirus 5′ UTR. In some embodiments, an immune response (e.g., a higher immune response) is obtained after an arenavirus particle of the present disclosure (e.g., arenavirus particle expressing a heterologous non-arenaviral polypeptide under control of an arenavirus 3′ UTR) is administered to a subject. In some embodiments, an immune response is obtained after an arenavirus particle expressing the heterologous non-arenaviral polypeptide under control of an arenavirus 5′ UTR is administered to a subject or to a comparable subject. In some embodiments, an immune response obtained after an arenavirus particle of the present disclosure is administered to a subject is compared to an immune response obtained after another arenavirus particle (e.g., arenavirus particle expressing the heterologous non-arenaviral polypeptide under control of an arenavirus 5′ UTR) is administered to a subject or to a comparable subject. In some embodiments, the subject and/or the comparable subject is a subject in need of treatment. In some embodiments, the subject and/or the comparable subject is a subject with a disease and/or with symptoms of a disease. In some embodiments, the comparable subject is a healthy subject. In some embodiments, the comparable subject is a subject without the disease. In some embodiments, the comparable subject is a subject not in need of treatment.

[0266] In certain embodiments, provided herein is an arenavirus particle engineered such that an arenaviral ORF is separated over two or more mRNA transcripts. In certain embodiments, provided herein is an arenavirus particle comprising the nucleotide sequence provided herein (see Section 5.5). In certain embodiments, provided herein is an arenavirus particle comprising the arenavirus genomic or antigenomic segment provided herein (see Section 5.7). The arenavirus particles described herein are genetically stable and provide high-level transgene expression.

[0267] In certain embodiments, the arenavirus particle is tri-segmented, namely consists of three arenavirus genomic or antigenomic segments. In certain embodiments, the three arenavirus genomic or antigenomic segments are two S segments and one L segment. In other embodiments, the three arenavirus genomic or antigenomic segments are one S segment and two L segments. In certain embodiments, the tri-segmented arenavirus particle comprises arenaviral ORFs encoding arenavirus GP, NP, Z and L. In certain embodiments, the tri-segmented arenavirus particle expresses one or more heterologous non-arenaviral polypeptide. In certain embodiments, the tri-segmented arenavirus particle described herein may consist of six positions in the arenavirus genomic or antigenomic segments, for example, position 1 is under the control of an arenavirus S segment 5′ UTR; position 2 is under the control of an arenavirus S segment 3′ UTR; position 3 is under the control of an arenavirus S segment 5′ UTR; position 4 is under the control of an arenavirus S segment 3′ UTR; position 5 is under the control of an arenavirus L segment 5′ UTR; position 6 is under the control of an arenavirus L segment 3′ UTR. In certain embodiments, positions 1-6 may encode the same polypeptide in two or more positions. In other embodiments, positions 1-6 may each encodes a different polypeptide. In certain embodiments, the tri-segmented arenavirus particle comprising positions 1-6 in the arenavirus genomic or antigenomic segments is replication competent. In other embodiments, the tri-segmented arenavirus particle comprising positions 1-6 in the arenavirus genomic or antigenomic segments is replication-defective.

[0268] In certain embodiments, the arenavirus particle is bi-segmented, namely consists of two arenavirus genomic or antigenomic segments. In certain embodiments, the two arenavirus genomic or antigenomic segments are one S segment and one L segment. In certain embodiments, the genome of a bi-segmented arenavirus particle may consist of four positions in the arenavirus genomic or antigenomic segments, for example, position 1 is under the control of an arenavirus S segment genomic 5′ UTR; position 2 is under the control of an arenavirus S segment genomic 3′ UTR; position 3 is under the control of an arenavirus L segment genomic 5′ UTR; position 4 is under the control of an arenavirus L segment genomic 3′ UTR. In certain embodiments, positions 1-4 may encode the same polypeptide in two or more positions. In other embodiments, positions 1-4 may each encode a different polypeptide. In certain embodiments, the bi-segmented arenavirus particle comprising positions 1-4 in the arenavirus genomic or antigenomic segments is replication competent. In other embodiments, the bi-segmented arenavirus particle comprising positions 1-4 in the arenavirus genomic or antigenomic segments is replication-defective. In some embodiments, the bi-segmented arenavirus depends on trans-complementation by a genetically engineered helper cell in order to form infectious progeny particles.

[0269] In certain embodiments, the arenavirus particle is derived from a Lymphocytic choriomeningitis virus (LCMV). In certain embodiments, the LCMV is a MP strain, an Armstrong strain, or an Armstrong Clone 13 strain. In other embodiments, the arenavirus particle is derived from a Lassa virus. In certain embodiments, the arenavirus particle is derived from a Pichinde virus (PICV). In certain embodiments, the arenavirus particle is derived from a Junin virus vaccine Candid #1, or a Junin virus vaccine XJ Clone 3 strain. In certain embodiments, the arenavirus particle is derived from an Oliveros virus. In certain embodiments, the arenavirus particle is derived from a Tamiami virus. In certain embodiments, the arenavirus particle is derived from a Mobala virus. In certain embodiments, the arenavirus particle is derived from a Mopeia virus. In certain embodiments, the arenavirus particle is derived from an Ippy virus. In certain embodiments, the arenavirus particle is derived from an Amapari virus. In certain embodiments, the arenavirus particle is derived from a Flexal virus. In certain embodiments, the arenavirus particle is derived from a Guanarito virus. In certain embodiments, the arenavirus particle is derived from a Latino virus. In certain embodiments, the arenavirus particle is derived from a Machupo virus. In certain embodiments, the arenavirus particle is derived from a Parana virus. In certain embodiments, the arenavirus particle is derived from a Pirital virus. In certain embodiments, the arenavirus particle is derived from a Sabia virus. In certain embodiments, the arenavirus particle is derived from a Tacaribe virus. In certain embodiments, the arenavirus particle is derived from a Bear Canyon virus. In certain embodiments, the arenavirus particle is derived from a Whitewater Arroyo virus. In certain embodiments, the arenavirus particle is derived from an Allpahuayo virus (ALLV). In certain embodiments, the arenavirus particle is derived from an Alxa virus. In certain embodiments, the arenavirus particle is derived from a Chapare virus. In certain embodiments, the arenavirus particle is derived from a Lijiang virus. In certain embodiments, the arenavirus particle is derived from a Cupixi virus. In certain embodiments, the arenavirus particle is derived from a Gairo virus. In certain embodiments, the arenavirus particle is derived from a Loei River virus. In certain embodiments, the arenavirus particle is derived from a Lujo virus. In certain embodiments, the arenavirus particle is derived from a Luna virus. In certain embodiments, the arenavirus particle is derived from a Luli virus. In certain embodiments, the arenavirus particle is derived from a Lunk virus. In certain embodiments, the arenavirus particle is derived from a Mariental virus. In certain embodiments, the arenavirus particle is derived from a Merino Walk virus. In certain embodiments, the arenavirus particle is derived from a Morogoro virus. In certain embodiments, the arenavirus particle is derived from an Okahandja virus. In certain embodiments, the arenavirus particle is derived from an Apore virus. In certain embodiments, the arenavirus particle is derived from a Ryukyu virus. In certain embodiments, the arenavirus particle is derived from a Solwezi virus. In certain embodiments, the arenavirus particle is derived from a souris virus. In certain embodiments, the arenavirus particle is derived from a Wenzhou virus. In certain embodiments, the arenavirus particle is derived from a Big Brushy Tank virus. In certain embodiments, the arenavirus particle is derived from a Catarina virus. In certain embodiments, the arenavirus particle is derived from a Skinner Tank virus. In certain embodiments, the arenavirus particle is derived from a Tonto Creek virus. In certain embodiments, the arenavirus particle is derived from a Xapuri virus.

[0270] In certain embodiments, the growth or infectivity of the arenavirus particle comprising the nucleotide sequence described herein is not inferior to a second arenavirus particle carrying one or more of the same heterologous non-arenaviral polypeptides, and all arenaviral GP, NP, Z and L in the second arenavirus particle are each expressed as one ORF. In certain embodiments, the growth or infectivity of the arenavirus particle comprising the nucleotide sequence described herein is not inferior to a second arenavirus particle, wherein the second arenavirus particle does not comprise a nucleotide sequence of a buffer peptide.

### 5.6.1 Arenaviral Open Reading Frame

[0271] In certain embodiments, the arenaviral ORF encodes a polypeptide selected from the group consisting of arenavirus GP, NP, Z, and L (see Section 5.1).

[0272] In certain embodiments, the arenaviral ORF encodes a polypeptide selected from the group consisting of arenavirus GP, NP, Z, and L, namely from the group consisting of arenavirus glycoprotein, nucleoprotein, Z protein, L protein, glycoprotein precursor, nucleoprotein precursor, Z protein precursor, and L protein precursor. In certain embodiments, the arenavirus GP, NP, Z, and L are wild-type. In other embodiments, the arenavirus GP, NP, Z, and L are recombinant. In certain embodiments, the arenavirus GP, NP, Z, and L are mutated. In certain embodiments, the arenavirus GP, NP, Z, and L are derived from an attenuated virus.

[0273] In certain embodiments, the arenaviral ORF encodes a polypeptide selected from the group consisting of wild-type arenavirus glycoprotein, nucleoprotein, Z protein, L protein, glycoprotein precursor, nucleoprotein precursor, Z protein precursor, and L protein precursor. In certain embodiments, the arenaviral ORF encodes a wild-type arenavirus glycoprotein precursor. In certain embodiments, the wild-type arenavirus glycoprotein precursor can be processed into a GP signal peptide, a GP1 and a GP2.

[0274] In certain embodiments, the arenaviral ORF encodes a polypeptide selected from the group consisting of recombinant arenavirus glycoprotein, nucleoprotein, Z protein, L protein, glycoprotein precursor, nucleoprotein precursor, Z protein precursor, and L protein precursor. In certain embodiments, the arenaviral ORF encodes a recombinant arenavirus glycoprotein precursor. In certain embodiments, the recombinant arenavirus glycoprotein precursor can be processed into a GP signal peptide, a GP1 and a GP2, one or more of which are recombinant.

[0275] In certain embodiments, the arenaviral ORF encodes a polypeptide selected from the group consisting of mutated arenavirus glycoprotein, nucleoprotein, Z protein, L protein, glycoprotein precursor, nucleoprotein precursor, Z protein precursor, and L protein precursor. In certain embodiments, the arenaviral ORF encodes a mutated arenavirus glycoprotein precursor. In certain embodiments, the mutated arenavirus glycoprotein precursor can be processed into a GP signal peptide, a GP1 and a GP2, one or more of which are mutated.

[0276] In certain embodiments, the arenaviral ORF encodes a polypeptide selected from the group consisting of arenavirus glycoprotein, nucleoprotein, Z protein, L protein, glycoprotein precursor, nucleoprotein precursor, Z protein precursor, and L protein precursor that are derived from an attenuated virus. In certain embodiments, the arenaviral ORF encodes arenavirus glycoprotein precursor derived from an attenuated virus. In certain embodiments, the arenavirus glycoprotein precursor derived from an attenuated virus can be processed into a GP signal peptide, a GP1 and a GP2, one or more of which are derived from an attenuated virus.

[0277] In certain embodiments, the arenaviral ORF encodes a polypeptide selected from the group consisting of GP, NP, Z and L of LCMV, Lassa virus, Pichinde virus, Oliveros virus, Tamiami virus, Mobala virus, Mopeia virus, Ippy virus, Amapari virus, Flexal virus, Guanarito virus, Latino virus, Machupo virus, Parana virus, Pirital virus, Sabia virus, Tacaribe virus, Bear Canyon virus, Whitewater Arroyo virus, Allpahuayo virus (ALLV), Alxa virus, Chapare virus, Lijiang virus, Cupixi virus, Gairo virus, Loei River virus, Lujo virus, Luna virus, Luli virus, Lunk virus, Mariental virus, Merino Walk virus, Morogoro virus, Okahandja virus, Apore virus, Ryukyu virus, Solwezi virus, souris virus, Wenzhou virus, Big Brushy Tank virus, Catarina virus, Skinner Tank virus, Tonto Creek virus, Xapuri virus, or Junin virus.

[0278] In certain embodiments, the arenaviral ORF encodes a polypeptide comprising an amino acid sequence that is at least 80%, 85%, 90%, 95%, 96%, 97%, 98%, 99% or 100% identical to the amino acid sequence of SEQ ID NO:1, SEQ ID NO:2, SEQ ID NO:3, SEQ ID NO:4, SEQ ID NO:5, SEQ ID NO:6, SEQ ID NO:7, SEQ ID NO:8, SEQ ID NO:9, SEQ ID NO:10, SEQ ID NO:11, SEQ ID NO:12, SEQ ID NO:13, SEQ ID NO:14, SEQ ID NO:15, SEQ ID NO:16, SEQ ID NO:17, SEQ ID NO:18, SEQ ID NO:19, SEQ ID NO:20, SEQ ID NO:21, SEQ ID NO:22, SEQ ID NO:23, SEQ ID NO:24, SEQ ID NO:48, SEQ ID NO:52, SEQ ID NO:59, SEQ ID NO:66, SEQ ID NO:73, SEQ ID NO:80, SEQ ID NO:84, SEQ ID NO:91, SEQ ID NO:98, SEQ ID NO:105, SEQ ID NO:109, SEQ ID NO:113, SEQ ID NO:120, SEQ ID NO:127, SEQ ID NO:134, SEQ ID NO:49, SEQ ID NO:56, SEQ ID NO:63, SEQ ID NO:70, SEQ ID NO:77, SEQ ID NO:81, SEQ ID NO:88, SEQ ID NO:95, SEQ ID NO:102, SEQ ID NO:106, SEQ ID NO:110, SEQ ID NO: 117, SEQ ID NO:124, SEQ ID NO:131, SEQ ID NO:138, SEQ ID NO:50, SEQ ID NO:57, SEQ ID NO:64, SEQ ID NO:71, SEQ ID NO:78, SEQ ID NO:82, SEQ ID NO:89, SEQ ID NO:96, SEQ ID NO:103, SEQ ID NO:107, SEQ ID NO:111, SEQ ID NO:118, SEQ ID NO:125, SEQ ID NO:132, SEQ ID NO:139, SEQ ID NO:51, SEQ ID NO:58, SEQ ID NO:65, SEQ ID NO:72, SEQ ID NO:79, SEQ ID NO:83, SEQ ID NO:90, SEQ ID NO:97, SEQ ID NO:104, SEQ ID NO:108, SEQ ID NO: 112, SEQ ID NO: 119, SEQ ID NO:126, SEQ ID NO:133, or SEQ ID NO:140. In certain embodiments, the arenaviral ORF encodes a polypeptide comprising an amino acid sequence that is at least 80% identical to the amino acid sequence of SEQ ID NO:1, SEQ ID NO:2, SEQ ID NO:3, SEQ ID NO:4, SEQ ID NO:5, SEQ ID NO:6, SEQ ID NO:7, SEQ ID NO:8, SEQ ID NO:9, SEQ ID NO:10, SEQ ID NO:11, SEQ ID NO:12, SEQ ID NO:13, SEQ ID NO:14, SEQ ID NO:15, SEQ ID NO:16, SEQ ID NO:17, SEQ ID NO:18, SEQ ID NO:19, SEQ ID NO:20, SEQ ID NO:21, SEQ ID NO:22, SEQ ID NO:23, SEQ ID NO:24, SEQ ID NO:48, SEQ ID NO:52, SEQ ID NO:59, SEQ ID NO:66, SEQ ID NO:73, SEQ ID NO:80, SEQ ID NO:84, SEQ ID NO:91, SEQ ID NO:98, SEQ ID NO:105, SEQ ID NO:109, SEQ ID NO:113, SEQ ID NO:120, SEQ ID NO:127, SEQ ID NO:134, SEQ ID NO:49, SEQ ID NO:56, SEQ ID NO:63, SEQ ID NO:70, SEQ ID NO:77, SEQ ID NO:81, SEQ ID NO:88, SEQ ID NO:95, SEQ ID NO:102, SEQ ID NO: 106, SEQ ID NO:110, SEQ ID NO: 117, SEQ ID NO:124, SEQ ID NO:131, SEQ ID NO:138, SEQ ID NO:50, SEQ ID NO:57, SEQ ID NO:64, SEQ ID NO:71, SEQ ID NO:78, SEQ ID NO:82, SEQ ID NO:89, SEQ ID NO:96, SEQ ID NO:103, SEQ ID NO:107, SEQ ID NO:111, SEQ ID NO:118, SEQ ID NO:125, SEQ ID NO:132, SEQ ID NO:139, SEQ ID NO:51, SEQ ID NO:58, SEQ ID NO:65, SEQ ID NO:72, SEQ ID NO:79, SEQ ID NO:83, SEQ ID NO:90, SEQ ID NO:97, SEQ ID NO:104, SEQ ID NO:108, SEQ ID NO:112, SEQ ID NO:119, SEQ ID NO:126, SEQ ID NO:133, or SEQ ID NO:140. In certain embodiments, the arenaviral ORF encodes a polypeptide comprising an amino acid sequence that is at least 85% identical to the amino acid sequence of SEQ ID NO:1, SEQ ID NO:2, SEQ ID NO:3, SEQ ID NO:4, SEQ ID NO:5, SEQ ID NO:6, SEQ ID NO:7, SEQ ID NO:8, SEQ ID NO:9, SEQ ID NO:10, SEQ ID NO:11, SEQ ID NO:12, SEQ ID NO:13, SEQ ID NO:14, SEQ ID NO:15, SEQ ID NO:16, SEQ ID NO:17, SEQ ID NO:18, SEQ ID NO:19, SEQ ID NO:20, SEQ ID NO:21, SEQ ID NO:22, SEQ ID NO:23, SEQ ID NO:24, SEQ ID NO:48, SEQ ID NO:52, SEQ ID NO:59, SEQ ID NO:66, SEQ ID NO:73, SEQ ID NO:80, SEQ ID NO:84, SEQ ID NO:91, SEQ ID NO:98, SEQ ID NO:105, SEQ ID NO:109, SEQ ID NO: 113, SEQ ID NO:120, SEQ ID NO:127, SEQ ID NO:134, SEQ ID NO:49, SEQ ID NO:56, SEQ ID NO:63, SEQ ID NO:70, SEQ ID NO:77, SEQ ID NO:81, SEQ ID NO:88, SEQ ID NO:95, SEQ ID NO:102, SEQ ID NO:106, SEQ ID NO:110, SEQ ID NO:117, SEQ ID NO:124, SEQ ID NO:131, SEQ ID NO:138, SEQ ID NO:50, SEQ ID NO:57, SEQ ID NO:64, SEQ ID NO:71, SEQ ID NO:78, SEQ ID NO:82, SEQ ID NO:89, SEQ ID NO:96, SEQ ID NO: 103, SEQ ID NO:107, SEQ ID NO:111, SEQ ID NO:118, SEQ ID NO:125, SEQ ID NO:132, SEQ ID NO:139, SEQ ID NO:51, SEQ ID NO:58, SEQ ID NO:65, SEQ ID NO:72, SEQ ID NO:79, SEQ ID NO:83, SEQ ID NO:90, SEQ ID NO:97, SEQ ID NO:104, SEQ ID NO: 108, SEQ ID NO: 112, SEQ ID NO: 119, SEQ ID NO:126, SEQ ID NO:133, or SEQ ID NO: 140. In certain embodiments, the arenaviral ORF encodes a polypeptide comprising an amino acid sequence that is at least 90% identical to the amino acid sequence of SEQ ID NO:1, SEQ ID NO:2, SEQ ID NO:3, SEQ ID NO:4, SEQ ID NO:5, SEQ ID NO:6, SEQ ID NO:7, SEQ ID NO:8, SEQ ID NO:9, SEQ ID NO:10, SEQ ID NO:11, SEQ ID NO:12, SEQ ID NO:13, SEQ ID NO:14, SEQ ID NO:15, SEQ ID NO:16, SEQ ID NO:17, SEQ ID NO:18, SEQ ID NO:19, SEQ ID NO:20, SEQ ID NO:21, SEQ ID NO:22, SEQ ID NO:23, SEQ ID NO:24, SEQ ID NO:48, SEQ ID NO:52, SEQ ID NO:59, SEQ ID NO:66, SEQ ID NO:73, SEQ ID NO:80, SEQ ID NO:84, SEQ ID NO:91, SEQ ID NO:98, SEQ ID NO:105, SEQ ID NO: 109, SEQ ID NO: 113, SEQ ID NO:120, SEQ ID NO:127, SEQ ID NO:134, SEQ ID NO:49, SEQ ID NO:56, SEQ ID NO:63, SEQ ID NO:70, SEQ ID NO:77, SEQ ID NO:81, SEQ ID NO:88, SEQ ID NO:95, SEQ ID NO:102, SEQ ID NO:106, SEQ ID NO:110, SEQ ID NO:117, SEQ ID NO:124, SEQ ID NO:131, SEQ ID NO:138, SEQ ID NO:50, SEQ ID NO:57, SEQ ID NO:64, SEQ ID NO:71, SEQ ID NO:78, SEQ ID NO:82, SEQ ID NO:89, SEQ ID NO:96, SEQ ID NO:103, SEQ ID NO:107, SEQ ID NO:111, SEQ ID NO:118, SEQ ID NO:125, SEQ ID NO:132, SEQ ID NO:139, SEQ ID NO:51, SEQ ID NO:58, SEQ ID NO:65, SEQ ID NO:72, SEQ ID NO:79, SEQ ID NO:83, SEQ ID NO:90, SEQ ID NO:97, SEQ ID NO:104, SEQ ID NO:108, SEQ ID NO:112, SEQ ID NO:119, SEQ ID NO:126, SEQ ID NO:133, or SEQ ID NO:140. In certain embodiments, the arenaviral ORF encodes a polypeptide comprising an amino acid sequence that is at least 95% identical to the amino acid sequence of SEQ ID NO:1, SEQ ID NO:2, SEQ ID NO:3, SEQ ID NO:4, SEQ ID NO:5, SEQ ID NO:6, SEQ ID NO:7, SEQ ID NO:8, SEQ ID NO:9, SEQ ID NO:10, SEQ ID NO:11, SEQ ID NO:12, SEQ ID NO:13, SEQ ID NO:14, SEQ ID NO:15, SEQ ID NO:16, SEQ ID NO:17, SEQ ID NO:18, SEQ ID NO:19, SEQ ID NO:20, SEQ ID NO:21, SEQ ID NO:22, SEQ ID NO:23, SEQ ID NO:24, SEQ ID NO:48, SEQ ID NO:52, SEQ ID NO:59, SEQ ID NO:66, SEQ ID NO:73, SEQ ID NO:80, SEQ ID NO:84, SEQ ID NO:91, SEQ ID NO:98, SEQ ID NO:105, SEQ ID NO:109, SEQ ID NO:113, SEQ ID NO:120, SEQ ID NO:127, SEQ ID NO:134, SEQ ID NO:49, SEQ ID NO:56, SEQ ID NO:63, SEQ ID NO:70, SEQ ID NO:77, SEQ ID NO:81, SEQ ID NO:88, SEQ ID NO:95, SEQ ID NO:102, SEQ ID NO: 106, SEQ ID NO:110, SEQ ID NO: 117, SEQ ID NO:124, SEQ ID NO:131, SEQ ID NO:138, SEQ ID NO:50, SEQ ID NO:57, SEQ ID NO:64, SEQ ID NO:71, SEQ ID NO:78, SEQ ID NO:82, SEQ ID NO:89, SEQ ID NO:96, SEQ ID NO:103, SEQ ID NO:107, SEQ ID NO:111, SEQ ID NO:118, SEQ ID NO:125, SEQ ID NO:132, SEQ ID NO:139, SEQ ID NO:51, SEQ ID NO:58, SEQ ID NO:65, SEQ ID NO:72, SEQ ID NO:79, SEQ ID NO:83, SEQ ID NO:90, SEQ ID NO:97, SEQ ID NO:104, SEQ ID NO:108, SEQ ID NO:112, SEQ ID NO:119, SEQ ID NO:126, SEQ ID NO:133, or SEQ ID NO:140. In certain embodiments, the arenaviral ORF encodes a polypeptide comprising an amino acid sequence that is at least 96% identical to the amino acid sequence of SEQ ID NO:1, SEQ ID NO:2, SEQ ID NO:3, SEQ ID NO:4, SEQ ID NO:5, SEQ ID NO:6, SEQ ID NO:7, SEQ ID NO:8, SEQ ID NO:9, SEQ ID NO:10, SEQ ID NO:11, SEQ ID NO:12, SEQ ID NO:13, SEQ ID NO:14, SEQ ID NO:15, SEQ ID NO:16, SEQ ID NO:17, SEQ ID NO:18, SEQ ID NO:19, SEQ ID NO:20, SEQ ID NO:21, SEQ ID NO:22, SEQ ID NO:23, SEQ ID NO:24, SEQ ID NO:48, SEQ ID NO:52, SEQ ID NO:59, SEQ ID NO:66, SEQ ID NO:73, SEQ ID NO:80, SEQ ID NO:84, SEQ ID NO:91, SEQ ID NO:98, SEQ ID NO:105, SEQ ID NO:109, SEQ ID NO: 113, SEQ ID NO:120, SEQ ID NO:127, SEQ ID NO:134, SEQ ID NO:49, SEQ ID NO:56, SEQ ID NO:63, SEQ ID NO:70, SEQ ID NO:77, SEQ ID NO:81, SEQ ID NO:88, SEQ ID NO:95, SEQ ID NO:102, SEQ ID NO:106, SEQ ID NO:110, SEQ ID NO:117, SEQ ID NO:124, SEQ ID NO:131, SEQ ID NO:138, SEQ ID NO:50, SEQ ID NO:57, SEQ ID NO:64, SEQ ID NO:71, SEQ ID NO:78, SEQ ID NO:82, SEQ ID NO:89, SEQ ID NO:96, SEQ ID NO: 103, SEQ ID NO:107, SEQ ID NO:111, SEQ ID NO:118, SEQ ID NO:125, SEQ ID NO:132, SEQ ID NO:139, SEQ ID NO:51, SEQ ID NO:58, SEQ ID NO:65, SEQ ID NO:72, SEQ ID NO:79, SEQ ID NO:83, SEQ ID NO:90, SEQ ID NO:97, SEQ ID NO:104, SEQ ID NO: 108, SEQ ID NO: 112, SEQ ID NO: 119, SEQ ID NO:126, SEQ ID NO:133, or SEQ ID NO: 140. In certain embodiments, the arenaviral ORF encodes a polypeptide comprising an amino acid sequence that is at least 97% identical to the amino acid sequence of SEQ ID NO:1, SEQ ID NO:2, SEQ ID NO:3, SEQ ID NO:4, SEQ ID NO:5, SEQ ID NO:6, SEQ ID NO:7, SEQ ID NO:8, SEQ ID NO:9, SEQ ID NO:10, SEQ ID NO:11, SEQ ID NO:12, SEQ ID NO:13, SEQ ID NO:14, SEQ ID NO:15, SEQ ID NO:16, SEQ ID NO:17, SEQ ID NO:18, SEQ ID NO:19, SEQ ID NO:20, SEQ ID NO:21, SEQ ID NO:22, SEQ ID NO:23, SEQ ID NO:24, SEQ ID NO:48, SEQ ID NO:52, SEQ ID NO:59, SEQ ID NO:66, SEQ ID NO:73, SEQ ID NO:80, SEQ ID NO:84, SEQ ID NO:91, SEQ ID NO:98, SEQ ID NO:105, SEQ ID NO: 109, SEQ ID NO: 113, SEQ ID NO:120, SEQ ID NO:127, SEQ ID NO:134, SEQ ID NO:49, SEQ ID NO:56, SEQ ID NO:63, SEQ ID NO:70, SEQ ID NO:77, SEQ ID NO:81, SEQ ID NO:88, SEQ ID NO:95, SEQ ID NO:102, SEQ ID NO:106, SEQ ID NO:110, SEQ ID NO:117, SEQ ID NO:124, SEQ ID NO:131, SEQ ID NO:138, SEQ ID NO:50, SEQ ID NO:57, SEQ ID NO:64, SEQ ID NO:71, SEQ ID NO:78, SEQ ID NO:82, SEQ ID NO:89, SEQ ID NO:96, SEQ ID NO:103, SEQ ID NO:107, SEQ ID NO:111, SEQ ID NO:118, SEQ ID NO:125, SEQ ID NO:132, SEQ ID NO:139, SEQ ID NO:51, SEQ ID NO:58, SEQ ID NO:65, SEQ ID NO:72, SEQ ID NO:79, SEQ ID NO:83, SEQ ID NO:90, SEQ ID NO:97, SEQ ID NO:104, SEQ ID NO:108, SEQ ID NO:112, SEQ ID NO:119, SEQ ID NO:126, SEQ ID NO:133, or SEQ ID NO:140. In certain embodiments, the arenaviral ORF encodes a polypeptide comprising an amino acid sequence that is at least 98% identical to the amino acid sequence of SEQ ID NO:1, SEQ ID NO:2, SEQ ID NO:3, SEQ ID NO:4, SEQ ID NO:5, SEQ ID NO:6, SEQ ID NO:7, SEQ ID NO:8, SEQ ID NO:9, SEQ ID NO:10, SEQ ID NO:11, SEQ ID NO:12, SEQ ID NO:13, SEQ ID NO:14, SEQ ID NO:15, SEQ ID NO:16, SEQ ID NO:17, SEQ ID NO:18, SEQ ID NO:19, SEQ ID NO:20, SEQ ID NO:21, SEQ ID NO:22, SEQ ID NO:23, SEQ ID NO:24, SEQ ID NO:48, SEQ ID NO:52, SEQ ID NO:59, SEQ ID NO:66, SEQ ID NO:73, SEQ ID NO:80, SEQ ID NO:84, SEQ ID NO:91, SEQ ID NO:98, SEQ ID NO:105, SEQ ID NO:109, SEQ ID NO:113, SEQ ID NO:120, SEQ ID NO:127, SEQ ID NO:134, SEQ ID NO:49, SEQ ID NO:56, SEQ ID NO:63, SEQ ID NO:70, SEQ ID NO:77, SEQ ID NO:81, SEQ ID NO:88, SEQ ID NO:95, SEQ ID NO:102, SEQ ID NO: 106, SEQ ID NO:110, SEQ ID NO: 117, SEQ ID NO:124, SEQ ID NO:131, SEQ ID NO:138, SEQ ID NO:50, SEQ ID NO:57, SEQ ID NO:64, SEQ ID NO:71, SEQ ID NO:78, SEQ ID NO:82, SEQ ID NO:89, SEQ ID NO:96, SEQ ID NO:103, SEQ ID NO:107, SEQ ID NO:111, SEQ ID NO:118, SEQ ID NO:125, SEQ ID NO:132, SEQ ID NO:139, SEQ ID NO:51, SEQ ID NO:58, SEQ ID NO:65, SEQ ID NO:72, SEQ ID NO:79, SEQ ID NO:83, SEQ ID NO:90, SEQ ID NO:97, SEQ ID NO:104, SEQ ID NO:108, SEQ ID NO:112, SEQ ID NO:119, SEQ ID NO:126, SEQ ID NO:133, or SEQ ID NO:140. In certain embodiments, the arenaviral ORF encodes a polypeptide comprising an amino acid sequence that is at least 99% identical to the amino acid sequence of SEQ ID NO:1, SEQ ID NO:2, SEQ ID NO:3, SEQ ID NO:4, SEQ ID NO:5, SEQ ID NO:6, SEQ ID NO:7, SEQ ID NO:8, SEQ ID NO:9, SEQ ID NO:10, SEQ ID NO:11, SEQ ID NO:12, SEQ ID NO:13, SEQ ID NO:14, SEQ ID NO:15, SEQ ID NO:16, SEQ ID NO:17, SEQ ID NO:18, SEQ ID NO:19, SEQ ID NO:20, SEQ ID NO:21, SEQ ID NO:22, SEQ ID NO:23, SEQ ID NO:24, SEQ ID NO:48, SEQ ID NO:52, SEQ ID NO:59, SEQ ID NO:66, SEQ ID NO:73, SEQ ID NO:80, SEQ ID NO:84, SEQ ID NO:91, SEQ ID NO:98, SEQ ID NO:105, SEQ ID NO:109, SEQ ID NO: 113, SEQ ID NO:120, SEQ ID NO:127, SEQ ID NO:134, SEQ ID NO:49, SEQ ID NO:56, SEQ ID NO:63, SEQ ID NO:70, SEQ ID NO:77, SEQ ID NO:81, SEQ ID NO:88, SEQ ID NO:95, SEQ ID NO:102, SEQ ID NO:106, SEQ ID NO:110, SEQ ID NO:117, SEQ ID NO:124, SEQ ID NO:131, SEQ ID NO:138, SEQ ID NO:50, SEQ ID NO:57, SEQ ID NO:64, SEQ ID NO:71, SEQ ID NO:78, SEQ ID NO:82, SEQ ID NO:89, SEQ ID NO:96, SEQ ID NO: 103, SEQ ID NO:107, SEQ ID NO:111, SEQ ID NO:118, SEQ ID NO:125, SEQ ID NO:132, SEQ ID NO:139, SEQ ID NO:51, SEQ ID NO:58, SEQ ID NO:65, SEQ ID NO:72, SEQ ID NO:79, SEQ ID NO:83, SEQ ID NO:90, SEQ ID NO:97, SEQ ID NO:104, SEQ ID NO: 108, SEQ ID NO: 112, SEQ ID NO: 119, SEQ ID NO:126, SEQ ID NO:133, or SEQ ID NO:140. In certain embodiments, the arenaviral ORF encodes a polypeptide comprising an amino acid sequence that is 100% identical to the amino acid sequence of SEQ ID NO:1, SEQ ID NO:2, SEQ ID NO:3, SEQ ID NO:4, SEQ ID NO:5, SEQ ID NO:6, SEQ ID NO:7, SEQ ID NO:8, SEQ ID NO:9, SEQ ID NO:10, SEQ ID NO:11, SEQ ID NO:12, SEQ ID NO:13, SEQ ID NO:14, SEQ ID NO:15, SEQ ID NO:16, SEQ ID NO:17, SEQ ID NO:18, SEQ ID NO:19, SEQ ID NO:20, SEQ ID NO:21, SEQ ID NO:22, SEQ ID NO:23, SEQ ID NO:24, SEQ ID NO:48, SEQ ID NO:52, SEQ ID NO:59, SEQ ID NO:66, SEQ ID NO:73, SEQ ID NO:80, SEQ ID NO:84, SEQ ID NO:91, SEQ ID NO:98, SEQ ID NO:105, SEQ ID NO:109, SEQ ID NO:113, SEQ ID NO:120, SEQ ID NO:127, SEQ ID NO:134, SEQ ID NO:49, SEQ ID NO:56, SEQ ID NO:63, SEQ ID NO:70, SEQ ID NO:77, SEQ ID NO:81, SEQ ID NO:88, SEQ ID NO:95, SEQ ID NO:102, SEQ ID NO:106, SEQ ID NO:110, SEQ ID NO:117, SEQ ID NO:124, SEQ ID NO:131, SEQ ID NO:138, SEQ ID NO:50, SEQ ID NO:57, SEQ ID NO:64, SEQ ID NO:71, SEQ ID NO:78, SEQ ID NO:82, SEQ ID NO:89, SEQ ID NO:96, SEQ ID NO:103, SEQ ID NO:107, SEQ ID NO:111, SEQ ID NO:118, SEQ ID NO:125, SEQ ID NO:132, SEQ ID NO:139, SEQ ID NO:51, SEQ ID NO:58, SEQ ID NO:65, SEQ ID NO:72, SEQ ID NO:79, SEQ ID NO:83, SEQ ID NO:90, SEQ ID NO:97, SEQ ID NO:104, SEQ ID NO:108, SEQ ID NO:112, SEQ ID NO: 119, SEQ ID NO:126, SEQ ID NO:133, or SEQ ID NO:140. In certain embodiments, the arenaviral ORF encodes a polypeptide comprising an amino acid sequence that is 80% identical to the amino acid sequence of SEQ ID NO:1, SEQ ID NO:2, SEQ ID NO:3, SEQ ID NO:4, SEQ ID NO:5, SEQ ID NO:6, SEQ ID NO:7, SEQ ID NO:8, SEQ ID NO:9, SEQ ID NO:10, SEQ ID NO:11, SEQ ID NO:12, SEQ ID NO:13, SEQ ID NO:14, SEQ ID NO:15, SEQ ID NO:16, SEQ ID NO:17, SEQ ID NO:18, SEQ ID NO:19, SEQ ID NO:20, SEQ ID NO:21, SEQ ID NO:22, SEQ ID NO:23, SEQ ID NO:24, SEQ ID NO:48, SEQ ID NO:52, SEQ ID NO:59, SEQ ID NO:66, SEQ ID NO:73, SEQ ID NO:80, SEQ ID NO:84, SEQ ID NO:91, SEQ ID NO:98, SEQ ID NO:105, SEQ ID NO:109, SEQ ID NO:113, SEQ ID NO:120, SEQ ID NO:127, SEQ ID NO:134, SEQ ID NO:49, SEQ ID NO:56, SEQ ID NO:63, SEQ ID NO:70, SEQ ID NO:77, SEQ ID NO:81, SEQ ID NO:88, SEQ ID NO:95, SEQ ID NO:102, SEQ ID NO:106, SEQ ID NO:110, SEQ ID NO: 117, SEQ ID NO:124, SEQ ID NO:131, SEQ ID NO:138, SEQ ID NO:50, SEQ ID NO:57, SEQ ID NO:64, SEQ ID NO:71, SEQ ID NO:78, SEQ ID NO:82, SEQ ID NO:89, SEQ ID NO:96, SEQ ID NO:103, SEQ ID NO:107, SEQ ID NO:111, SEQ ID NO:118, SEQ ID NO:125, SEQ ID NO:132, SEQ ID NO:139, SEQ ID NO:51, SEQ ID NO:58, SEQ ID NO:65, SEQ ID NO:72, SEQ ID NO:79, SEQ ID NO:83, SEQ ID NO:90, SEQ ID NO:97, SEQ ID NO:104, SEQ ID NO:108, SEQ ID NO: 112, SEQ ID NO: 119, SEQ ID NO:126, SEQ ID NO:133, or SEQ ID NO:140. In certain embodiments, the arenaviral ORF encodes a polypeptide comprising an amino acid sequence that is 85% identical to the amino acid sequence of SEQ ID NO:1, SEQ ID NO:2, SEQ ID NO:3, SEQ ID NO:4, SEQ ID NO:5, SEQ ID NO:6, SEQ ID NO:7, SEQ ID NO:8, SEQ ID NO:9, SEQ ID NO:10, SEQ ID NO:11, SEQ ID NO:12, SEQ ID NO:13, SEQ ID NO:14, SEQ ID NO:15, SEQ ID NO:16, SEQ ID NO:17, SEQ ID NO:18, SEQ ID NO:19, SEQ ID NO:20, SEQ ID NO:21, SEQ ID NO:22, SEQ ID NO:23, SEQ ID NO:24, SEQ ID NO:48, SEQ ID NO:52, SEQ ID NO:59, SEQ ID NO:66, SEQ ID NO:73, SEQ ID NO:80, SEQ ID NO:84, SEQ ID NO:91, SEQ ID NO:98, SEQ ID NO:105, SEQ ID NO:109, SEQ ID NO:113, SEQ ID NO:120, SEQ ID NO:127, SEQ ID NO:134, SEQ ID NO:49, SEQ ID NO:56, SEQ ID NO:63, SEQ ID NO:70, SEQ ID NO:77, SEQ ID NO:81, SEQ ID NO:88, SEQ ID NO:95, SEQ ID NO:102, SEQ ID NO: 106, SEQ ID NO:110, SEQ ID NO: 117, SEQ ID NO:124, SEQ ID NO:131, SEQ ID NO:138, SEQ ID NO:50, SEQ ID NO:57, SEQ ID NO:64, SEQ ID NO:71, SEQ ID NO:78, SEQ ID NO:82, SEQ ID NO:89, SEQ ID NO:96, SEQ ID NO:103, SEQ ID NO:107, SEQ ID NO:111, SEQ ID NO:118, SEQ ID NO:125, SEQ ID NO:132, SEQ ID NO:139, SEQ ID NO:51, SEQ ID NO:58, SEQ ID NO:65, SEQ ID NO:72, SEQ ID NO:79, SEQ ID NO:83, SEQ ID NO:90, SEQ ID NO:97, SEQ ID NO:104, SEQ ID NO:108, SEQ ID NO:112, SEQ ID NO:119, SEQ ID NO:126, SEQ ID NO:133, or SEQ ID NO:140. In certain embodiments, the arenaviral ORF encodes a polypeptide comprising an amino acid sequence that is 90% identical to the amino acid sequence of SEQ ID NO:1, SEQ ID NO:2, SEQ ID NO:3, SEQ ID NO:4, SEQ ID NO:5, SEQ ID NO:6, SEQ ID NO:7, SEQ ID NO:8, SEQ ID NO:9, SEQ ID NO:10, SEQ ID NO: 11, SEQ ID NO:12, SEQ ID NO:13, SEQ ID NO:14, SEQ ID NO:15, SEQ ID NO:16, SEQ ID NO:17, SEQ ID NO:18, SEQ ID NO:19, SEQ ID NO:20, SEQ ID NO:21, SEQ ID NO:22, SEQ ID NO:23, SEQ ID NO:24, SEQ ID NO:48, SEQ ID NO:52, SEQ ID NO:59, SEQ ID NO:66, SEQ ID NO:73, SEQ ID NO:80, SEQ ID NO:84, SEQ ID NO:91, SEQ ID NO:98, SEQ ID NO:105, SEQ ID NO:109, SEQ ID NO: 113, SEQ ID NO:120, SEQ ID NO:127, SEQ ID NO:134, SEQ ID NO:49, SEQ ID NO:56, SEQ ID NO:63, SEQ ID NO:70, SEQ ID NO:77, SEQ ID NO:81, SEQ ID NO:88, SEQ ID NO:95, SEQ ID NO:102, SEQ ID NO:106, SEQ ID NO:110, SEQ ID NO:117, SEQ ID NO:124, SEQ ID NO:131, SEQ ID NO:138, SEQ ID NO:50, SEQ ID NO:57, SEQ ID NO:64, SEQ ID NO:71, SEQ ID NO:78, SEQ ID NO:82, SEQ ID NO:89, SEQ ID NO:96, SEQ ID NO: 103, SEQ ID NO:107, SEQ ID NO:111, SEQ ID NO:118, SEQ ID NO:125, SEQ ID NO:132, SEQ ID NO:139, SEQ ID NO:51, SEQ ID NO:58, SEQ ID NO:65, SEQ ID NO:72, SEQ ID NO:79, SEQ ID NO:83, SEQ ID NO:90, SEQ ID NO:97, SEQ ID NO:104, SEQ ID NO: 108, SEQ ID NO: 112, SEQ ID NO: 119, SEQ ID NO:126, SEQ ID NO:133, or SEQ ID NO:140. In certain embodiments, the arenaviral ORF encodes a polypeptide comprising an amino acid sequence that is 95% identical to the amino acid sequence of SEQ ID NO:1, SEQ ID NO:2, SEQ ID NO:3, SEQ ID NO:4, SEQ ID NO:5, SEQ ID NO:6, SEQ ID NO:7, SEQ ID NO:8, SEQ ID NO:9, SEQ ID NO:10, SEQ ID NO:11, SEQ ID NO:12, SEQ ID NO:13, SEQ ID NO:14, SEQ ID NO:15, SEQ ID NO:16, SEQ ID NO:17, SEQ ID NO:18, SEQ ID NO:19, SEQ ID NO:20, SEQ ID NO:21, SEQ ID NO:22, SEQ ID NO:23, SEQ ID NO:24, SEQ ID NO:48, SEQ ID NO:52, SEQ ID NO:59, SEQ ID NO:66, SEQ ID NO:73, SEQ ID NO:80, SEQ ID NO:84, SEQ ID NO:91, SEQ ID NO:98, SEQ ID NO:105, SEQ ID NO:109, SEQ ID NO:113, SEQ ID NO:120, SEQ ID NO:127, SEQ ID NO:134, SEQ ID NO:49, SEQ ID NO:56, SEQ ID NO:63, SEQ ID NO:70, SEQ ID NO:77, SEQ ID NO:81, SEQ ID NO:88, SEQ ID NO:95, SEQ ID NO:102, SEQ ID NO:106, SEQ ID NO:110, SEQ ID NO:117, SEQ ID NO:124, SEQ ID NO:131, SEQ ID NO:138, SEQ ID NO:50, SEQ ID NO:57, SEQ ID NO:64, SEQ ID NO:71, SEQ ID NO:78, SEQ ID NO:82, SEQ ID NO:89, SEQ ID NO:96, SEQ ID NO:103, SEQ ID NO:107, SEQ ID NO:111, SEQ ID NO:118, SEQ ID NO:125, SEQ ID NO:132, SEQ ID NO:139, SEQ ID NO:51, SEQ ID NO:58, SEQ ID NO:65, SEQ ID NO:72, SEQ ID NO:79, SEQ ID NO:83, SEQ ID NO:90, SEQ ID NO:97, SEQ ID NO:104, SEQ ID NO:108, SEQ ID NO:112, SEQ ID NO: 119, SEQ ID NO:126, SEQ ID NO:133, or SEQ ID NO:140. In certain embodiments, the arenaviral ORF encodes a polypeptide comprising an amino acid sequence that is 96% identical to the amino acid sequence of SEQ ID NO:1, SEQ ID NO:2, SEQ ID NO:3, SEQ ID NO:4, SEQ ID NO:5, SEQ ID NO:6, SEQ ID NO:7, SEQ ID NO:8, SEQ ID NO:9, SEQ ID NO:10, SEQ ID NO:11, SEQ ID NO:12, SEQ ID NO:13, SEQ ID NO:14, SEQ ID NO:15, SEQ ID NO:16, SEQ ID NO:17, SEQ ID NO:18, SEQ ID NO:19, SEQ ID NO:20, SEQ ID NO:21, SEQ ID NO:22, SEQ ID NO:23, SEQ ID NO:24, SEQ ID NO:48, SEQ ID NO:52, SEQ ID NO:59, SEQ ID NO:66, SEQ ID NO:73, SEQ ID NO:80, SEQ ID NO:84, SEQ ID NO:91, SEQ ID NO:98, SEQ ID NO:105, SEQ ID NO:109, SEQ ID NO:113, SEQ ID NO:120, SEQ ID NO:127, SEQ ID NO:134, SEQ ID NO:49, SEQ ID NO:56, SEQ ID NO:63, SEQ ID NO:70, SEQ ID NO:77, SEQ ID NO:81, SEQ ID NO:88, SEQ ID NO:95, SEQ ID NO:102, SEQ ID NO:106, SEQ ID NO:110, SEQ ID NO: 117, SEQ ID NO:124, SEQ ID NO:131, SEQ ID NO:138, SEQ ID NO:50, SEQ ID NO:57, SEQ ID NO:64, SEQ ID NO:71, SEQ ID NO:78, SEQ ID NO:82, SEQ ID NO:89, SEQ ID NO:96, SEQ ID NO:103, SEQ ID NO:107, SEQ ID NO:111, SEQ ID NO:118, SEQ ID NO:125, SEQ ID NO:132, SEQ ID NO:139, SEQ ID NO:51, SEQ ID NO:58, SEQ ID NO:65, SEQ ID NO:72, SEQ ID NO:79, SEQ ID NO:83, SEQ ID NO:90, SEQ ID NO:97, SEQ ID NO:104, SEQ ID NO:108, SEQ ID NO: 112, SEQ ID NO: 119, SEQ ID NO:126, SEQ ID NO:133, or SEQ ID NO:140. In certain embodiments, the arenaviral ORF encodes a polypeptide comprising an amino acid sequence that is 97% identical to the amino acid sequence of SEQ ID NO:1, SEQ ID NO:2, SEQ ID NO:3, SEQ ID NO:4, SEQ ID NO:5, SEQ ID NO:6, SEQ ID NO:7, SEQ ID NO:8, SEQ ID NO:9, SEQ ID NO:10, SEQ ID NO:11, SEQ ID NO:12, SEQ ID NO:13, SEQ ID NO:14, SEQ ID NO:15, SEQ ID NO:16, SEQ ID NO:17, SEQ ID NO:18, SEQ ID NO:19, SEQ ID NO:20, SEQ ID NO:21, SEQ ID NO:22, SEQ ID NO:23, SEQ ID NO:24, SEQ ID NO:48, SEQ ID NO:52, SEQ ID NO:59, SEQ ID NO:66, SEQ ID NO:73, SEQ ID NO:80, SEQ ID NO:84, SEQ ID NO:91, SEQ ID NO:98, SEQ ID NO:105, SEQ ID NO:109, SEQ ID NO:113, SEQ ID NO:120, SEQ ID NO:127, SEQ ID NO:134, SEQ ID NO:49, SEQ ID NO:56, SEQ ID NO:63, SEQ ID NO:70, SEQ ID NO:77, SEQ ID NO:81, SEQ ID NO:88, SEQ ID NO:95, SEQ ID NO:102, SEQ ID NO: 106, SEQ ID NO:110, SEQ ID NO: 117, SEQ ID NO:124, SEQ ID NO:131, SEQ ID NO:138, SEQ ID NO:50, SEQ ID NO:57, SEQ ID NO:64, SEQ ID NO:71, SEQ ID NO:78, SEQ ID NO:82, SEQ ID NO:89, SEQ ID NO:96, SEQ ID NO:103, SEQ ID NO:107, SEQ ID NO:111, SEQ ID NO:118, SEQ ID NO:125, SEQ ID NO:132, SEQ ID NO:139, SEQ ID NO:51, SEQ ID NO:58, SEQ ID NO:65, SEQ ID NO:72, SEQ ID NO:79, SEQ ID NO:83, SEQ ID NO:90, SEQ ID NO:97, SEQ ID NO:104, SEQ ID NO:108, SEQ ID NO:112, SEQ ID NO:119, SEQ ID NO:126, SEQ ID NO:133, or SEQ ID NO:140. In certain embodiments, the arenaviral ORF encodes a polypeptide comprising an amino acid sequence that is 98% identical to the amino acid sequence of SEQ ID NO:1, SEQ ID NO:2, SEQ ID NO:3, SEQ ID NO:4, SEQ ID NO:5, SEQ ID NO:6, SEQ ID NO:7, SEQ ID NO:8, SEQ ID NO:9, SEQ ID NO:10, SEQ ID NO: 11, SEQ ID NO:12, SEQ ID NO:13, SEQ ID NO:14, SEQ ID NO:15, SEQ ID NO:16, SEQ ID NO:17, SEQ ID NO:18, SEQ ID NO:19, SEQ ID NO:20, SEQ ID NO:21, SEQ ID NO:22, SEQ ID NO:23, SEQ ID NO:24, SEQ ID NO:48, SEQ ID NO:52, SEQ ID NO:59, SEQ ID NO:66, SEQ ID NO:73, SEQ ID NO:80, SEQ ID NO:84, SEQ ID NO:91, SEQ ID NO:98, SEQ ID NO:105, SEQ ID NO:109, SEQ ID NO: 113, SEQ ID NO:120, SEQ ID NO:127, SEQ ID NO:134, SEQ ID NO:49, SEQ ID NO:56, SEQ ID NO:63, SEQ ID NO:70, SEQ ID NO:77, SEQ ID NO:81, SEQ ID NO:88, SEQ ID NO:95, SEQ ID NO:102, SEQ ID NO:106, SEQ ID NO:110, SEQ ID NO:117, SEQ ID NO:124, SEQ ID NO:131, SEQ ID NO:138, SEQ ID NO:50, SEQ ID NO:57, SEQ ID NO:64, SEQ ID NO:71, SEQ ID NO:78, SEQ ID NO:82, SEQ ID NO:89, SEQ ID NO:96, SEQ ID NO: 103, SEQ ID NO:107, SEQ ID NO:111, SEQ ID NO:118, SEQ ID NO:125, SEQ ID NO:132, SEQ ID NO:139, SEQ ID NO:51, SEQ ID NO:58, SEQ ID NO:65, SEQ ID NO:72, SEQ ID NO:79, SEQ ID NO:83, SEQ ID NO:90, SEQ ID NO:97, SEQ ID NO:104, SEQ ID NO: 108, SEQ ID NO: 112, SEQ ID NO: 119, SEQ ID NO:126, SEQ ID NO:133, or SEQ ID NO: 140. In certain embodiments, the arenaviral ORF encodes a polypeptide comprising an amino acid sequence that is 99% identical to the amino acid sequence of SEQ ID NO:1, SEQ ID NO:2, SEQ ID NO:3, SEQ ID NO:4, SEQ ID NO:5, SEQ ID NO:6, SEQ ID NO:7, SEQ ID NO:8, SEQ ID NO:9, SEQ ID NO:10, SEQ ID NO:11, SEQ ID NO:12, SEQ ID NO:13, SEQ ID NO:14, SEQ ID NO:15, SEQ ID NO:16, SEQ ID NO:17, SEQ ID NO:18, SEQ ID NO:19, SEQ ID NO:20, SEQ ID NO:21, SEQ ID NO:22, SEQ ID NO:23, SEQ ID NO:24, SEQ ID NO:48, SEQ ID NO:52, SEQ ID NO:59, SEQ ID NO:66, SEQ ID NO:73, SEQ ID NO:80, SEQ ID NO:84, SEQ ID NO:91, SEQ ID NO:98, SEQ ID NO:105, SEQ ID NO:109, SEQ ID NO:113, SEQ ID NO:120, SEQ ID NO:127, SEQ ID NO:134, SEQ ID NO:49, SEQ ID NO:56, SEQ ID NO:63, SEQ ID NO:70, SEQ ID NO:77, SEQ ID NO:81, SEQ ID NO:88, SEQ ID NO:95, SEQ ID NO:102, SEQ ID NO:106, SEQ ID NO:110, SEQ ID NO:117, SEQ ID NO:124, SEQ ID NO:131, SEQ ID NO:138, SEQ ID NO:50, SEQ ID NO:57, SEQ ID NO:64, SEQ ID NO:71, SEQ ID NO:78, SEQ ID NO:82, SEQ ID NO:89, SEQ ID NO:96, SEQ ID NO:103, SEQ ID NO:107, SEQ ID NO:111, SEQ ID NO:118, SEQ ID NO:125, SEQ ID NO:132, SEQ ID NO:139, SEQ ID NO:51, SEQ ID NO:58, SEQ ID NO:65, SEQ ID NO:72, SEQ ID NO:79, SEQ ID NO:83, SEQ ID NO:90, SEQ ID NO:97, SEQ ID NO:104, SEQ ID NO: 108, SEQ ID NO:112, SEQ ID NO:119, SEQ ID NO:126, SEQ ID NO:133, or SEQ ID NO:140.

[0279] In certain embodiments, the arenaviral ORF encodes arenavirus GP, namely arenavirus glycoprotein or any glycoprotein precursor. In certain embodiments, the arenaviral ORF encodes a wild-type arenavirus glycoprotein or any wild-type glycoprotein precursor. In other embodiments, the arenaviral ORF encodes a recombinant arenavirus glycoprotein or any recombinant glycoprotein precursor. In certain embodiments, the arenavirus glycoprotein precursor can be processed into a GP signal peptide, a GP1 and a GP2. In certain embodiments, the arenavirus GP is arenavirus glycoprotein or any glycoprotein precursor of LCMV, Lassa virus, Pichinde virus, Oliveros virus, Tamiami virus, Mobala virus, Mopeia virus, Ippy virus, Amapari virus, Flexal virus, Guanarito virus, Latino virus, Machupo virus, Parana virus, Pirital virus, Sabia virus, Tacaribe virus, Bear Canyon virus, Whitewater Arroyo virus, Allpahuayo virus (ALLV), Alxa virus, Chapare virus, Lijiang virus, Cupixi virus, Gairo virus, Loei River virus, Lujo virus, Luna virus, Luli virus, Lunk virus, Mariental virus, Merino Walk virus, Morogoro virus, Okahandja virus, Apore virus, Ryukyu virus, Solwezi virus, souris virus, Wenzhou virus, Big Brushy Tank virus, Catarina virus, Skinner Tank virus, Tonto Creek virus, Xapuri virus, or Junin virus. In certain embodiments, the arenavirus GP as described herein comprises an amino acid sequence that is at least 80%, 85%, 90%, 95%, 96%, 97%, 98%, 99% or 100% identical to the amino acid sequence of SEQ ID NO:1, SEQ ID NO:2, SEQ ID NO:3, SEQ ID NO:4, SEQ ID NO:5, SEQ ID NO:6, SEQ ID NO:48, SEQ ID NO:52, SEQ ID NO:59, SEQ ID NO:66, SEQ ID NO:73, SEQ ID NO:80, SEQ ID NO:84, SEQ ID NO:91, SEQ ID NO:98, SEQ ID NO:105, SEQ ID NO:109, SEQ ID NO:113, SEQ ID NO:120, SEQ ID NO:127, or SEQ ID NO:134. In certain embodiments, the arenavirus GP as described herein comprises an amino acid sequence that is at least 80% identical to the amino acid sequence of SEQ ID NO:1, SEQ ID NO:2, SEQ ID NO:3, SEQ ID NO:4, SEQ ID NO:5, SEQ ID NO:6, SEQ ID NO:48, SEQ ID NO:52, SEQ ID NO:59, SEQ ID NO:66, SEQ ID NO:73, SEQ ID NO:80, SEQ ID NO:84, SEQ ID NO:91, SEQ ID NO:98, SEQ ID NO:105, SEQ ID NO:109, SEQ ID NO:113, SEQ ID NO:120, SEQ ID NO:127, or SEQ ID NO:134. In certain embodiments, the arenavirus GP as described herein comprises an amino acid sequence that is at least 85% identical to the amino acid sequence of SEQ ID NO:1, SEQ ID NO:2, SEQ ID NO:3, SEQ ID NO:4, SEQ ID NO:5, SEQ ID NO:6, SEQ ID NO:48, SEQ ID NO:52, SEQ ID NO:59, SEQ ID NO:66, SEQ ID NO:73, SEQ ID NO:80, SEQ ID NO:84, SEQ ID NO:91, SEQ ID NO:98, SEQ ID NO:105, SEQ ID NO:109, SEQ ID NO:113, SEQ ID NO:120, SEQ ID NO:127, or SEQ ID NO:134. In certain embodiments, the GP as described herein comprises an amino acid sequence that is at least 90% identical to the amino acid sequence of SEQ ID NO:1, SEQ ID NO:2, SEQ ID NO:3, SEQ ID NO:4, SEQ ID NO:5, SEQ ID NO:6, SEQ ID NO:48, SEQ ID NO:52, SEQ ID NO:59, SEQ ID NO:66, SEQ ID NO:73, SEQ ID NO:80, SEQ ID NO:84, SEQ ID NO:91, SEQ ID NO:98, SEQ ID NO:105, SEQ ID NO:109, SEQ ID NO:113, SEQ ID NO:120, SEQ ID NO:127, or SEQ ID NO:134. In certain embodiments, the arenavirus GP as described herein comprises an amino acid sequence that is at least 95% identical to the amino acid sequence of SEQ ID NO:1, SEQ ID NO:2, SEQ ID NO:3, SEQ ID NO:4, SEQ ID NO:5, SEQ ID NO:6, SEQ ID NO:48, SEQ ID NO:52, SEQ ID NO:59, SEQ ID NO:66, SEQ ID NO:73, SEQ ID NO:80, SEQ ID NO:84, SEQ ID NO:91, SEQ ID NO:98, SEQ ID NO:105, SEQ ID NO:109, SEQ ID NO: 113, SEQ ID NO:120, SEQ ID NO:127, or SEQ ID NO:134. In certain embodiments, the arenavirus GP as described herein comprises an amino acid sequence that is at least 96% identical to the amino acid sequence of SEQ ID NO:1, SEQ ID NO:2, SEQ ID NO:3, SEQ ID NO:4, SEQ ID NO:5, SEQ ID NO:6, SEQ ID NO:48, SEQ ID NO:52, SEQ ID NO:59, SEQ ID NO:66, SEQ ID NO:73, SEQ ID NO:80, SEQ ID NO:84, SEQ ID NO:91, SEQ ID NO:98, SEQ ID NO:105, SEQ ID NO:109, SEQ ID NO:113, SEQ ID NO:120, SEQ ID NO:127, or SEQ ID NO:134. In certain embodiments, the arenavirus GP as described herein comprises an amino acid sequence that is at least 97% identical to the amino acid sequence of SEQ ID NO:1, SEQ ID NO:2, SEQ ID NO:3, SEQ ID NO:4, SEQ ID NO:5, SEQ ID NO:6, SEQ ID NO:48, SEQ ID NO:52, SEQ ID NO:59, SEQ ID NO:66, SEQ ID NO:73, SEQ ID NO:80, SEQ ID NO:84, SEQ ID NO:91, SEQ ID NO:98, SEQ ID NO:105, SEQ ID NO:109, SEQ ID NO: 113, SEQ ID NO:120, SEQ ID NO:127, or SEQ ID NO: 134. In certain embodiments, the arenavirus GP as described herein comprises an amino acid sequence that is at least 98% identical to the amino acid sequence of SEQ ID NO:1, SEQ ID NO:2, SEQ ID NO:3, SEQ ID NO:4, SEQ ID NO:5, SEQ ID NO:6, SEQ ID NO:48, SEQ ID NO:52, SEQ ID NO:59, SEQ ID NO:66, SEQ ID NO:73, SEQ ID NO:80, SEQ ID NO:84, SEQ ID NO:91, SEQ ID NO:98, SEQ ID NO:105, SEQ ID NO:109, SEQ ID NO:113, SEQ ID NO:120, SEQ ID NO:127, or SEQ ID NO:134. In certain embodiments, the arenavirus GP as described herein comprises an amino acid sequence that is at least 99% identical to the amino acid sequence of SEQ ID NO:1, SEQ ID NO:2, SEQ ID NO:3, SEQ ID NO:4, SEQ ID NO:5, SEQ ID NO:6, SEQ ID NO:48, SEQ ID NO:52, SEQ ID NO:59, SEQ ID NO:66, SEQ ID NO:73, SEQ ID NO:80, SEQ ID NO:84, SEQ ID NO:91, SEQ ID NO:98, SEQ ID NO:105, SEQ ID NO:109, SEQ ID NO: 113, SEQ ID NO:120, SEQ ID NO:127, or SEQ ID NO:134. In certain embodiments, the arenavirus GP as described herein comprises an amino acid sequence that is 100% identical to the amino acid sequence of SEQ ID NO:1, SEQ ID NO:2, SEQ ID NO:3, SEQ ID NO:4, SEQ ID NO:5, SEQ ID NO:6, SEQ ID NO:48, SEQ ID NO:52, SEQ ID NO:59, SEQ ID NO:66, SEQ ID NO:73, SEQ ID NO:80, SEQ ID NO:84, SEQ ID NO:91, SEQ ID NO:98, SEQ ID NO:105, SEQ ID NO:109, SEQ ID NO:113, SEQ ID NO:120, SEQ ID NO:127, or SEQ ID NO:134. In certain embodiments, the GP as described herein comprises an amino acid sequence that is 80% identical to the amino acid sequence of SEQ ID NO:1, SEQ ID NO:2, SEQ ID NO:3, SEQ ID NO:4, SEQ ID NO:5, SEQ ID NO:6, SEQ ID NO:48, SEQ ID NO:52, SEQ ID NO:59, SEQ ID NO:66, SEQ ID NO:73, SEQ ID NO:80, SEQ ID NO:84, SEQ ID NO:91, SEQ ID NO:98, SEQ ID NO:105, SEQ ID NO:109, SEQ ID NO: 113, SEQ ID NO:120, SEQ ID NO:127, or SEQ ID NO:134. In certain embodiments, the arenavirus GP as described herein comprises an amino acid sequence that is 85% identical to the amino acid sequence of SEQ ID NO:1, SEQ ID NO:2, SEQ ID NO:3, SEQ ID NO:4, SEQ ID NO:5, SEQ ID NO:6, SEQ ID NO:48, SEQ ID NO:52, SEQ ID NO:59, SEQ ID NO:66, SEQ ID NO:73, SEQ ID NO:80, SEQ ID NO:84, SEQ ID NO:91, SEQ ID NO:98, SEQ ID NO:105, SEQ ID NO:109, SEQ ID NO:113, SEQ ID NO:120, SEQ ID NO:127, or SEQ ID NO:134. In certain embodiments, the arenavirus GP as described herein comprises an amino acid sequence that is 90% identical to the amino acid sequence of SEQ ID NO:1, SEQ ID NO:2, SEQ ID NO:3, SEQ ID NO:4, SEQ ID NO:5, SEQ ID NO:6, SEQ ID NO:48, SEQ ID NO:52, SEQ ID NO:59, SEQ ID NO:66, SEQ ID NO:73, SEQ ID NO:80, SEQ ID NO:84, SEQ ID NO:91, SEQ ID NO:98, SEQ ID NO:105, SEQ ID NO:109, SEQ ID NO: 113, SEQ ID NO:120, SEQ ID NO:127, or SEQ ID NO:134. In certain embodiments, the arenavirus GP as described herein comprises an amino acid sequence that is 95% identical to the amino acid sequence of SEQ ID NO:1, SEQ ID NO:2, SEQ ID NO:3, SEQ ID NO:4, SEQ ID NO:5, SEQ ID NO:6, SEQ ID NO:48, SEQ ID NO:52, SEQ ID NO:59, SEQ ID NO:66, SEQ ID NO:73, SEQ ID NO:80, SEQ ID NO:84, SEQ ID NO:91, SEQ ID NO:98, SEQ ID NO:105, SEQ ID NO:109, SEQ ID NO:113, SEQ ID NO:120, SEQ ID NO:127, or SEQ ID NO:134. In certain embodiments, the arenavirus GP as described herein comprises an amino acid sequence that is 96% identical to the amino acid sequence of SEQ ID NO:1, SEQ ID NO:2, SEQ ID NO:3, SEQ ID NO:4, SEQ ID NO:5, SEQ ID NO:6, SEQ ID NO:48, SEQ ID NO:52, SEQ ID NO:59, SEQ ID NO:66, SEQ ID NO:73, SEQ ID NO:80, SEQ ID NO:84, SEQ ID NO:91, SEQ ID NO:98, SEQ ID NO:105, SEQ ID NO:109, SEQ ID NO: 113, SEQ ID NO:120, SEQ ID NO:127, or SEQ ID NO:134. In certain embodiments, the arenavirus GP as described herein comprises an amino acid sequence that is 97% identical to the amino acid sequence of SEQ ID NO:1, SEQ ID NO:2, SEQ ID NO:3, SEQ ID NO:4, SEQ ID NO:5, SEQ ID NO:6, SEQ ID NO:48, SEQ ID NO:52, SEQ ID NO:59, SEQ ID NO:66, SEQ ID NO:73, SEQ ID NO:80, SEQ ID NO:84, SEQ ID NO:91, SEQ ID NO:98, SEQ ID NO:105, SEQ ID NO:109, SEQ ID NO:113, SEQ ID NO:120, SEQ ID NO:127, or SEQ ID NO:134. In certain embodiments, the arenavirus GP as described herein comprises an amino acid sequence that is 98% identical to the amino acid sequence of SEQ ID NO:1, SEQ ID NO:2, SEQ ID NO:3, SEQ ID NO:4, SEQ ID NO:5, SEQ ID NO:6, SEQ ID NO:48, SEQ ID NO:52, SEQ ID NO:59, SEQ ID NO:66, SEQ ID NO:73, SEQ ID NO:80, SEQ ID NO:84, SEQ ID NO:91, SEQ ID NO:98, SEQ ID NO:105, SEQ ID NO:109, SEQ ID NO: 113, SEQ ID NO:120, SEQ ID NO:127, or SEQ ID NO:134. In certain embodiments, the arenavirus GP as described herein comprises an amino acid sequence that is 99% identical to the amino acid sequence of SEQ ID NO:1, SEQ ID NO:2, SEQ ID NO:3, SEQ ID NO:4, SEQ ID NO:5, SEQ ID NO:6, SEQ ID NO:48, SEQ ID NO:52, SEQ ID NO:59, SEQ ID NO:66, SEQ ID NO:73, SEQ ID NO:80, SEQ ID NO:84, SEQ ID NO:91, SEQ ID NO:98, SEQ ID NO: 105, SEQ ID NO:109, SEQ ID NO:113, SEQ ID NO:120, SEQ ID NO:127, or SEQ ID NO: 134.

[0280] In certain embodiments, the arenaviral ORF encodes arenavirus NP, namely arenavirus nucleoprotein or any nucleoprotein precursor. In certain embodiments, the arenaviral ORF encodes a wild-type arenavirus nucleoprotein or any wild-type nucleoprotein precursor. In other embodiments, the arenaviral ORF encodes a recombinant arenavirus nucleoprotein or any recombinant nucleoprotein precursor. In certain embodiments, the arenavirus NP is arenavirus nucleoprotein or any nucleoprotein precursor of LCMV, Lassa virus, Pichinde virus, Oliveros virus, Tamiami virus, Mobala virus, Mopeia virus, Ippy virus, Amapari virus, Flexal virus, Guanarito virus, Latino virus, Machupo virus, Parana virus, Pirital virus, Sabia virus, Tacaribe virus, Bear Canyon virus, Whitewater Arroyo virus, Allpahuayo virus (ALLV), Alxa virus, Chapare virus, Lijiang virus, Cupixi virus, Gairo virus, Loei River virus, Lujo virus, Luna virus, Luli virus, Lunk virus, Mariental virus, Merino Walk virus, Morogoro virus, Okahandja virus, Apore virus, Ryukyu virus, Solwezi virus, souris virus, Wenzhou virus, Big Brushy Tank virus, Catarina virus, Skinner Tank virus, Tonto Creek virus, Xapuri virus, or Junin virus. In certain embodiments, the arenavirus NP as described herein comprises an amino acid sequence that is at least 80%, 85%, 90%, 95%, 96%, 97%, 98%, 99% or 100% identical to the amino acid sequence of SEQ ID NO:7, SEQ ID NO:8, SEQ ID NO:9, SEQ ID NO:10, SEQ ID NO: 11, SEQ ID NO:12, SEQ ID NO:49, SEQ ID NO:56, SEQ ID NO:63, SEQ ID NO:70, SEQ ID NO:77, SEQ ID NO:81, SEQ ID NO:88, SEQ ID NO:95, SEQ ID NO:102, SEQ ID NO:106, SEQ ID NO:110, SEQ ID NO:117, SEQ ID NO:124, SEQ ID NO:131, or SEQ ID NO:138. In certain embodiments, the arenavirus NP as described herein comprises an amino acid sequence that is at least 80% identical to the amino acid sequence of SEQ ID NO:7, SEQ ID NO:8, SEQ ID NO:9, SEQ ID NO:10, SEQ ID NO:11, SEQ ID NO:12, SEQ ID NO:49, SEQ ID NO:56, SEQ ID NO:63, SEQ ID NO:70, SEQ ID NO:77, SEQ ID NO:81, SEQ ID NO:88, SEQ ID NO:95, SEQ ID NO:102, SEQ ID NO:106, SEQ ID NO:110, SEQ ID NO: 117, SEQ ID NO:124, SEQ ID NO:131, or SEQ ID NO:138. In certain embodiments, the arenavirus NP as described herein comprises an amino acid sequence that is at least 85% identical to the amino acid sequence of SEQ ID NO:7, SEQ ID NO:8, SEQ ID NO:9, SEQ ID NO:10, SEQ ID NO:11, SEQ ID NO:12, SEQ ID NO:49, SEQ ID NO:56, SEQ ID NO:63, SEQ ID NO:70, SEQ ID NO:77, SEQ ID NO:81, SEQ ID NO:88, SEQ ID NO:95, SEQ ID NO:102, SEQ ID NO:106, SEQ ID NO:110, SEQ ID NO:117, SEQ ID NO:124, SEQ ID NO:131, or SEQ ID NO:138. In certain embodiments, the arenavirus NP as described herein comprises an amino acid sequence that is at least 90% identical to the amino acid sequence of SEQ ID NO:7, SEQ ID NO:8, SEQ ID NO:9, SEQ ID NO:10, SEQ ID NO: 11, SEQ ID NO:12, SEQ ID NO:49, SEQ ID NO:56, SEQ ID NO:63, SEQ ID NO:70, SEQ ID NO:77, SEQ ID NO:81, SEQ ID NO:88, SEQ ID NO:95, SEQ ID NO:102, SEQ ID NO:106, SEQ ID NO:110, SEQ ID NO:117, SEQ ID NO:124, SEQ ID NO:131, or SEQ ID NO:138. In certain embodiments, the arenavirus NP as described herein comprises an amino acid sequence that is at least 95% identical to the amino acid sequence of SEQ ID NO:7, SEQ ID NO:8, SEQ ID NO:9, SEQ ID NO:10, SEQ ID NO:11, SEQ ID NO:12, SEQ ID NO:49, SEQ ID NO:56, SEQ ID NO:63, SEQ ID NO:70, SEQ ID NO:77, SEQ ID NO:81, SEQ ID NO:88, SEQ ID NO:95, SEQ ID NO:102, SEQ ID NO:106, SEQ ID NO:110, SEQ ID NO:117, SEQ ID NO:124, SEQ ID NO:131, or SEQ ID NO:138. In certain embodiments, the arenavirus NP as described herein comprises an amino acid sequence that is at least 96% identical to the amino acid sequence of SEQ ID NO:7, SEQ ID NO:8, SEQ ID NO:9, SEQ ID NO:10, SEQ ID NO:11, SEQ ID NO:12, SEQ ID NO:49, SEQ ID NO:56, SEQ ID NO:63, SEQ ID NO:70, SEQ ID NO:77, SEQ ID NO:81, SEQ ID NO:88, SEQ ID NO:95, SEQ ID NO:102, SEQ ID NO:106, SEQ ID NO:110, SEQ ID NO:117, SEQ ID NO:124, SEQ ID NO:131, or SEQ ID NO:138. In certain embodiments, the arenavirus NP as described herein comprises an amino acid sequence that is at least 97% identical to the amino acid sequence of SEQ ID NO:7, SEQ ID NO:8, SEQ ID NO:9, SEQ ID NO:10, SEQ ID NO:11, SEQ ID NO:12, SEQ ID NO:49, SEQ ID NO:56, SEQ ID NO:63, SEQ ID NO:70, SEQ ID NO:77, SEQ ID NO:81, SEQ ID NO:88, SEQ ID NO:95, SEQ ID NO:102, SEQ ID NO:106, SEQ ID NO:110, SEQ ID NO: 117, SEQ ID NO:124, SEQ ID NO:131, or SEQ ID NO:138. In certain embodiments, the arenavirus NP as described herein comprises an amino acid sequence that is at least 98% identical to the amino acid sequence of SEQ ID NO:7, SEQ ID NO:8, SEQ ID NO:9, SEQ ID NO:10, SEQ ID NO:11, SEQ ID NO:12, SEQ ID NO:49, SEQ ID NO:56, SEQ ID NO:63, SEQ ID NO:70, SEQ ID NO:77, SEQ ID NO:81, SEQ ID NO:88, SEQ ID NO:95, SEQ ID NO:102, SEQ ID NO:106, SEQ ID NO:110, SEQ ID NO:117, SEQ ID NO:124, SEQ ID NO:131, or SEQ ID NO:138. In certain embodiments, the arenavirus NP as described herein comprises an amino acid sequence that is at least 99% identical to the amino acid sequence of SEQ ID NO:7, SEQ ID NO:8, SEQ ID NO:9, SEQ ID NO:10, SEQ ID NO: 11, SEQ ID NO:12, SEQ ID NO:49, SEQ ID NO:56, SEQ ID NO:63, SEQ ID NO:70, SEQ ID NO:77, SEQ ID NO:81, SEQ ID NO:88, SEQ ID NO:95, SEQ ID NO:102, SEQ ID NO:106, SEQ ID NO:110, SEQ ID NO:117, SEQ ID NO:124, SEQ ID NO:131, or SEQ ID NO:138. In certain embodiments, the arenavirus NP as described herein comprises an amino acid sequence that is 100% identical to the amino acid sequence of SEQ ID NO:7, SEQ ID NO:8, SEQ ID NO:9, SEQ ID NO:10, SEQ ID NO:11, SEQ ID NO:12, SEQ ID NO:49, SEQ ID NO:56, SEQ ID NO:63, SEQ ID NO:70, SEQ ID NO:77, SEQ ID NO:81, SEQ ID NO:88, SEQ ID NO:95, SEQ ID NO:102, SEQ ID NO:106, SEQ ID NO:110, SEQ ID NO:117, SEQ ID NO:124, SEQ ID NO:131, or SEQ ID NO:138. In certain embodiments, the arenavirus NP as described herein comprises an amino acid sequence that is 80% identical to the amino acid sequence of SEQ ID NO:7, SEQ ID NO:8, SEQ ID NO:9, SEQ ID NO:10, SEQ ID NO: 11, SEQ ID NO:12, SEQ ID NO:49, SEQ ID NO:56, SEQ ID NO:63, SEQ ID NO:70, SEQ ID NO:77, SEQ ID NO:81, SEQ ID NO:88, SEQ ID NO:95, SEQ ID NO:102, SEQ ID NO:106, SEQ ID NO:110, SEQ ID NO:117, SEQ ID NO:124, SEQ ID NO:131, or SEQ ID NO:138. In certain embodiments, the arenavirus NP as described herein comprises an amino acid sequence that is 85% identical to the amino acid sequence of SEQ ID NO:7, SEQ ID NO:8, SEQ ID NO:9, SEQ ID NO:10, SEQ ID NO: 11, SEQ ID NO:12, SEQ ID NO:49, SEQ ID NO:56, SEQ ID NO:63, SEQ ID NO:70, SEQ ID NO:77, SEQ ID NO:81, SEQ ID NO:88, SEQ ID NO:95, SEQ ID NO:102, SEQ ID NO:106, SEQ ID NO:110, SEQ ID NO: 117, SEQ ID NO:124, SEQ ID NO:131, or SEQ ID NO:138. In certain embodiments, the arenavirus NP as described herein comprises an amino acid sequence that is 90% identical to the amino acid sequence of SEQ ID NO:7, SEQ ID NO:8, SEQ ID NO:9, SEQ ID NO:10, SEQ ID NO:11, SEQ ID NO:12, SEQ ID NO:49, SEQ ID NO:56, SEQ ID NO:63, SEQ ID NO:70, SEQ ID NO:77, SEQ ID NO:81, SEQ ID NO:88, SEQ ID NO:95, SEQ ID NO:102, SEQ ID NO:106, SEQ ID NO:110, SEQ ID NO:117, SEQ ID NO:124, SEQ ID NO:131, or SEQ ID NO:138. In certain embodiments, the arenavirus NP as described herein comprises an amino acid sequence that is 95% identical to the amino acid sequence of SEQ ID NO:7, SEQ ID NO:8, SEQ ID NO:9, SEQ ID NO:10, SEQ ID NO: 11, SEQ ID NO:12, SEQ ID NO:49, SEQ ID NO:56, SEQ ID NO:63, SEQ ID NO:70, SEQ ID NO:77, SEQ ID NO:81, SEQ ID NO:88, SEQ ID NO:95, SEQ ID NO:102, SEQ ID NO: 106, SEQ ID NO:110, SEQ ID NO: 117, SEQ ID NO:124, SEQ ID NO:131, or SEQ ID NO:138. In certain embodiments, the arenavirus NP as described herein comprises an amino acid sequence that is 96% identical to the amino acid sequence of SEQ ID NO:7, SEQ ID NO:8, SEQ ID NO:9, SEQ ID NO:10, SEQ ID NO:11, SEQ ID NO:12, SEQ ID NO:49, SEQ ID NO:56, SEQ ID NO:63, SEQ ID NO:70, SEQ ID NO:77, SEQ ID NO:81, SEQ ID NO:88, SEQ ID NO:95, SEQ ID NO:102, SEQ ID NO:106, SEQ ID NO:110, SEQ ID NO:117, SEQ ID NO:124, SEQ ID NO:131, or SEQ ID NO:138. In certain embodiments, the arenavirus NP as described herein comprises an amino acid sequence that is 97% identical to the amino acid sequence of SEQ ID NO:7, SEQ ID NO:8, SEQ ID NO:9, SEQ ID NO:10, SEQ ID NO:11, SEQ ID NO:12, SEQ ID NO:49, SEQ ID NO:56, SEQ ID NO:63, SEQ ID NO:70, SEQ ID NO:77, SEQ ID NO:81, SEQ ID NO:88, SEQ ID NO:95, SEQ ID NO:102, SEQ ID NO: 106, SEQ ID NO:110, SEQ ID NO: 117, SEQ ID NO:124, SEQ ID NO:131, or SEQ ID NO:138. In certain embodiments, the arenavirus NP as described herein comprises an amino acid sequence that is 98% identical to the amino acid sequence of SEQ ID NO:7, SEQ ID NO:8, SEQ ID NO:9, SEQ ID NO:10, SEQ ID NO:11, SEQ ID NO:12, SEQ ID NO:49, SEQ ID NO:56, SEQ ID NO:63, SEQ ID NO:70, SEQ ID NO:77, SEQ ID NO:81, SEQ ID NO:88, SEQ ID NO:95, SEQ ID NO:102, SEQ ID NO:106, SEQ ID NO:110, SEQ ID NO:117, SEQ ID NO:124, SEQ ID NO:131, or SEQ ID NO:138. In certain embodiments, the arenavirus NP as described herein comprises an amino acid sequence that is 99% identical to the amino acid sequence of SEQ ID NO:7, SEQ ID NO:8, SEQ ID NO:9, SEQ ID NO:10, SEQ ID NO:11, SEQ ID NO:12, SEQ ID NO:49, SEQ ID NO:56, SEQ ID NO:63, SEQ ID NO:70, SEQ ID NO:77, SEQ ID NO:81, SEQ ID NO:88, SEQ ID NO:95, SEQ ID NO:102, SEQ ID NO: 106, SEQ ID NO:110, SEQ ID NO: 117, SEQ ID NO:124, SEQ ID NO:131, or SEQ ID NO: 138.

[0281] In certain embodiments, the arenaviral ORF encodes arenavirus Z, namely arenavirus Z protein or any Z protein precursor. In certain embodiments, the polypeptide described herein is a wild-type arenavirus Z protein or any wild-type Z protein precursor. In certain embodiments, the arenaviral ORF encodes a recombinant arenavirus Z protein or any recombinant Z protein precursor. In certain embodiments, the arenavirus Z is arenavirus Z protein or any Z protein precursor of LCMV, Lassa virus, Pichinde virus, Oliveros virus, Tamiami virus, Mobala virus, Mopeia virus, Ippy virus, Amapari virus, Flexal virus, Guanarito virus, Latino virus, Machupo virus, Parana virus, Pirital virus, Sabia virus, Tacaribe virus, Bear Canyon virus, Whitewater Arroyo virus, Allpahuayo virus (ALLV), Alxa virus, Chapare virus, Lijiang virus, Cupixi virus, Gairo virus, Loei River virus, Lujo virus, Luna virus, Luli virus, Lunk virus, Mariental virus, Merino Walk virus, Morogoro virus, Okahandja virus, Apore virus, Ryukyu virus, Solwezi virus, souris virus, Wenzhou virus, Big Brushy Tank virus, Catarina virus, Skinner Tank virus, Tonto Creek virus, Xapuri virus, or Junin virus. In certain embodiments, the arenavirus Z as described herein comprises an amino acid sequence that is at least 80%, 85%, 90%, 95%, 96%, 97%, 98%, 99% or 100% identical to the amino acid sequence of SEQ ID NO:13, SEQ ID NO:14, SEQ ID NO:15, SEQ ID NO:16, SEQ ID NO:17, SEQ ID NO:18, SEQ ID NO:50, SEQ ID NO:57, SEQ ID NO:64, SEQ ID NO:71, SEQ ID NO:78, SEQ ID NO:82, SEQ ID NO:89, SEQ ID NO:96, SEQ ID NO:103, SEQ ID NO:107, SEQ ID NO:111, SEQ ID NO:118, SEQ ID NO:125, SEQ ID NO:132, or SEQ ID NO:139. In certain embodiments, the arenavirus Z as described herein comprises an amino acid sequence that is at least 80% identical to the amino acid sequence of SEQ ID NO:13, SEQ ID NO:14, SEQ ID NO:15, SEQ ID NO:16, SEQ ID NO:17, SEQ ID NO:18, SEQ ID NO:50, SEQ ID NO:57, SEQ ID NO:64, SEQ ID NO:71, SEQ ID NO:78, SEQ ID NO:82, SEQ ID NO:89, SEQ ID NO:96, SEQ ID NO:103, SEQ ID NO:107, SEQ ID NO:111, SEQ ID NO:118, SEQ ID NO:125, SEQ ID NO:132, or SEQ ID NO:139. In certain embodiments, the arenavirus Z as described herein comprises an amino acid sequence that is at least 85% identical to the amino acid sequence of SEQ ID NO:13, SEQ ID NO:14, SEQ ID NO:15, SEQ ID NO:16, SEQ ID NO:17, SEQ ID NO:18, SEQ ID NO:50, SEQ ID NO:57, SEQ ID NO:64, SEQ ID NO:71, SEQ ID NO:78, SEQ ID NO:82, SEQ ID NO:89, SEQ ID NO:96, SEQ ID NO: 103, SEQ ID NO:107, SEQ ID NO:111, SEQ ID NO: 118, SEQ ID NO:125, SEQ ID NO:132, or SEQ ID NO:139. In certain embodiments, the arenavirus Z as described herein comprises an amino acid sequence that is at least 90% identical to the amino acid sequence of SEQ ID NO:13, SEQ ID NO:14, SEQ ID NO:15, SEQ ID NO:16, SEQ ID NO:17, SEQ ID NO:18, SEQ ID NO:50, SEQ ID NO:57, SEQ ID NO:64, SEQ ID NO:71, SEQ ID NO:78, SEQ ID NO:82, SEQ ID NO:89, SEQ ID NO:96, SEQ ID NO:103, SEQ ID NO:107, SEQ ID NO:111, SEQ ID NO:118, SEQ ID NO:125, SEQ ID NO:132, or SEQ ID NO:139. In certain embodiments, the arenavirus Z as described herein comprises an amino acid sequence that is at least 95% identical to the amino acid sequence of SEQ ID NO:13, SEQ ID NO:14, SEQ ID NO:15, SEQ ID NO:16, SEQ ID NO:17, SEQ ID NO:18, SEQ ID NO:50, SEQ ID NO:57, SEQ ID NO:64, SEQ ID NO:71, SEQ ID NO:78, SEQ ID NO:82, SEQ ID NO:89, SEQ ID NO:96, SEQ ID NO:103, SEQ ID NO:107, SEQ ID NO:111, SEQ ID NO:118, SEQ ID NO:125, SEQ ID NO:132, or SEQ ID NO: 139. In certain embodiments, the arenavirus Z as described herein comprises an amino acid sequence that is at least 96% identical to the amino acid sequence of SEQ ID NO:13, SEQ ID NO:14, SEQ ID NO:15, SEQ ID NO:16, SEQ ID NO:17, SEQ ID NO:18, SEQ ID NO:50, SEQ ID NO:57, SEQ ID NO:64, SEQ ID NO:71, SEQ ID NO:78, SEQ ID NO:82, SEQ ID NO:89, SEQ ID NO:96, SEQ ID NO: 103, SEQ ID NO:107, SEQ ID NO:111, SEQ ID NO: 118, SEQ ID NO:125, SEQ ID NO:132, or SEQ ID NO:139. In certain embodiments, the arenavirus Z as described herein comprises an amino acid sequence that is at least 97% identical to the amino acid sequence of SEQ ID NO:13, SEQ ID NO:14, SEQ ID NO:15, SEQ ID NO:16, SEQ ID NO:17, SEQ ID NO:18, SEQ ID NO:50, SEQ ID NO:57, SEQ ID NO:64, SEQ ID NO:71, SEQ ID NO:78, SEQ ID NO:82, SEQ ID NO:89, SEQ ID NO:96, SEQ ID NO:103, SEQ ID NO:107, SEQ ID NO:111, SEQ ID NO:118, SEQ ID NO:125, SEQ ID NO:132, or SEQ ID NO:139. In certain embodiments, the arenavirus Z as described herein comprises an amino acid sequence that is at least 98% identical to the amino acid sequence of SEQ ID NO:13, SEQ ID NO:14, SEQ ID NO:15, SEQ ID NO:16, SEQ ID NO:17, SEQ ID NO:18, SEQ ID NO:50, SEQ ID NO:57, SEQ ID NO:64, SEQ ID NO:71, SEQ ID NO:78, SEQ ID NO:82, SEQ ID NO:89, SEQ ID NO:96, SEQ ID NO:103, SEQ ID NO:107, SEQ ID NO:111, SEQ ID NO:118, SEQ ID NO:125, SEQ ID NO:132, or SEQ ID NO:139. In certain embodiments, the arenavirus Z as described herein comprises an amino acid sequence that is at least 99% identical to the amino acid sequence of SEQ ID NO:13, SEQ ID NO:14, SEQ ID NO:15, SEQ ID NO:16, SEQ ID NO:17, SEQ ID NO:18, SEQ ID NO:50, SEQ ID NO:57, SEQ ID NO:64, SEQ ID NO:71, SEQ ID NO:78, SEQ ID NO:82, SEQ ID NO:89, SEQ ID NO:96, SEQ ID NO: 103, SEQ ID NO:107, SEQ ID NO:111, SEQ ID NO: 118, SEQ ID NO:125, SEQ ID NO:132, or SEQ ID NO:139. In certain embodiments, the arenavirus Z as described herein comprises an amino acid sequence that is 100% identical to the amino acid sequence of SEQ ID NO:13, SEQ ID NO:14, SEQ ID NO:15, SEQ ID NO:16, SEQ ID NO:17, SEQ ID NO:18, SEQ ID NO:50, SEQ ID NO:57, SEQ ID NO:64, SEQ ID NO:71, SEQ ID NO:78, SEQ ID NO:82, SEQ ID NO:89, SEQ ID NO:96, SEQ ID NO:103, SEQ ID NO: 107, SEQ ID NO:111, SEQ ID NO:118, SEQ ID NO:125, SEQ ID NO:132, or SEQ ID NO:139. In certain embodiments, the arenavirus Z as described herein comprises an amino acid sequence that is 80% identical to the amino acid sequence of SEQ ID NO:13, SEQ ID NO:14, SEQ ID NO:15, SEQ ID NO:16, SEQ ID NO:17, SEQ ID NO:18, SEQ ID NO:50, SEQ ID NO:57, SEQ ID NO:64, SEQ ID NO:71, SEQ ID NO:78, SEQ ID NO:82, SEQ ID NO:89, SEQ ID NO:96, SEQ ID NO:103, SEQ ID NO:107, SEQ ID NO:111, SEQ ID NO:118, SEQ ID NO:125, SEQ ID NO:132, or SEQ ID NO:139. In certain embodiments, the arenavirus Z as described herein comprises an amino acid sequence that is 85% identical to the amino acid sequence of SEQ ID NO:13, SEQ ID NO:14, SEQ ID NO:15, SEQ ID NO:16, SEQ ID NO:17, SEQ ID NO:18, SEQ ID NO:50, SEQ ID NO:57, SEQ ID NO:64, SEQ ID NO:71, SEQ ID NO:78, SEQ ID NO:82, SEQ ID NO:89, SEQ ID NO:96, SEQ ID NO:103, SEQ ID NO:107, SEQ ID NO:111, SEQ ID NO:118, SEQ ID NO:125, SEQ ID NO:132, or SEQ ID NO:139. In certain embodiments, the arenavirus Z as described herein comprises an amino acid sequence that is 90% identical to the amino acid sequence of SEQ ID NO:13, SEQ ID NO:14, SEQ ID NO:15, SEQ ID NO:16, SEQ ID NO:17, SEQ ID NO:18, SEQ ID NO:50, SEQ ID NO:57, SEQ ID NO:64, SEQ ID NO:71, SEQ ID NO:78, SEQ ID NO:82, SEQ ID NO:89, SEQ ID NO:96, SEQ ID NO:103, SEQ ID NO:107, SEQ ID NO:111, SEQ ID NO:118, SEQ ID NO:125, SEQ ID NO:132, or SEQ ID NO:139. In certain embodiments, the arenavirus Z as described herein comprises an amino acid sequence that is 95% identical to the amino acid sequence of SEQ ID NO:13, SEQ ID NO:14, SEQ ID NO:15, SEQ ID NO:16, SEQ ID NO:17, SEQ ID NO:18, SEQ ID NO:50, SEQ ID NO:57, SEQ ID NO:64, SEQ ID NO:71, SEQ ID NO:78, SEQ ID NO:82, SEQ ID NO:89, SEQ ID NO:96, SEQ ID NO:103, SEQ ID NO:107, SEQ ID NO:111, SEQ ID NO:118, SEQ ID NO:125, SEQ ID NO:132, or SEQ ID NO: 139. In certain embodiments, the arenavirus Z as described herein comprises an amino acid sequence that is 96% identical to the amino acid sequence of SEQ ID NO:13, SEQ ID NO:14, SEQ ID NO:15, SEQ ID NO:16, SEQ ID NO:17, SEQ ID NO:18, SEQ ID NO:50, SEQ ID NO:57, SEQ ID NO:64, SEQ ID NO:71, SEQ ID NO:78, SEQ ID NO:82, SEQ ID NO:89, SEQ ID NO:96, SEQ ID NO:103, SEQ ID NO:107, SEQ ID NO:111, SEQ ID NO:118, SEQ ID NO:125, SEQ ID NO:132, or SEQ ID NO:139. In certain embodiments, the arenavirus Z as described herein comprises an amino acid sequence that is 97% identical to the amino acid sequence of SEQ ID NO:13, SEQ ID NO:14, SEQ ID NO:15, SEQ ID NO:16, SEQ ID NO:17, SEQ ID NO:18, SEQ ID NO:50, SEQ ID NO:57, SEQ ID NO:64, SEQ ID NO:71, SEQ ID NO:78, SEQ ID NO:82, SEQ ID NO:89, SEQ ID NO:96, SEQ ID NO:103, SEQ ID NO:107, SEQ ID NO:111, SEQ ID NO:118, SEQ ID NO:125, SEQ ID NO:132, or SEQ ID NO:139. In certain embodiments, the arenavirus Z as described herein comprises an amino acid sequence that is 98% identical to the amino acid sequence of SEQ ID NO:13, SEQ ID NO:14, SEQ ID NO:15, SEQ ID NO:16, SEQ ID NO:17, SEQ ID NO:18, SEQ ID NO:50, SEQ ID NO:57, SEQ ID NO:64, SEQ ID NO:71, SEQ ID NO:78, SEQ ID NO:82, SEQ ID NO:89, SEQ ID NO:96, SEQ ID NO:103, SEQ ID NO:107, SEQ ID NO:111, SEQ ID NO:118, SEQ ID NO:125, SEQ ID NO:132, or SEQ ID NO:139. In certain embodiments, the arenavirus Z as described herein comprises an amino acid sequence that is 99% identical to the amino acid sequence of SEQ ID NO:13, SEQ ID NO:14, SEQ ID NO:15, SEQ ID NO:16, SEQ ID NO:17, SEQ ID NO:18, SEQ ID NO:50, SEQ ID NO:57, SEQ ID NO:64, SEQ ID NO:71, SEQ ID NO:78, SEQ ID NO:82, SEQ ID NO:89, SEQ ID NO:96, SEQ ID NO:103, SEQ ID NO:107, SEQ ID NO:111, SEQ ID NO:118, SEQ ID NO:125, SEQ ID NO:132, or SEQ ID NO:139.

[0282] In certain embodiments, the arenaviral ORF encodes arenavirus L, namely arenavirus L protein or any L protein precursor. In certain embodiments, the arenaviral ORF encodes a wild-type arenavirus L protein or any wild-type L protein precursor. In certain embodiments, the arenaviral ORF encodes a recombinant arenavirus L protein or any recombinant L protein precursor. In certain embodiments, the arenavirus L is arenavirus L protein or any L protein precursor of LCMV, Lassa virus, Pichinde virus, Oliveros virus, Tamiami virus, Mobala virus, Mopeia virus, Ippy virus, Amapari virus, Flexal virus, Guanarito virus, Latino virus, Machupo virus, Parana virus, Pirital virus, Sabia virus, Tacaribe virus, Bear Canyon virus, Whitewater Arroyo virus, Allpahuayo virus (ALLV), Alxa virus, Chapare virus, Lijiang virus, Cupixi virus, Gairo virus, Loei River virus, Lujo virus, Luna virus, Luli virus, Lunk virus, Mariental virus, Merino Walk virus, Morogoro virus, Okahandja virus, Apore virus, Ryukyu virus, Solwezi virus, souris virus, Wenzhou virus, Big Brushy Tank virus, Catarina virus, Skinner Tank virus, Tonto Creek virus, Xapuri virus, or Junin virus. In certain embodiments, the arenavirus L as described herein comprises an amino acid sequence that is at least 80%, 85%, 90%, 95%, 96%, 97%, 98%, 99% or 100% identical to the amino acid sequence of SEQ ID NO:19, SEQ ID NO:20, SEQ ID NO:21, SEQ ID NO:22, SEQ ID NO:23, SEQ ID NO:24, SEQ ID NO:51, SEQ ID NO:58, SEQ ID NO:65, SEQ ID NO:72, SEQ ID NO:79, SEQ ID NO:83, SEQ ID NO:90, SEQ ID NO:97, SEQ ID NO:104, SEQ ID NO:108, SEQ ID NO:112, SEQ ID NO:119, SEQ ID NO:126, SEQ ID NO:133, or SEQ ID NO:140. In certain embodiments, the arenavirus L as described herein comprises an amino acid sequence that is at least 80% identical to the amino acid sequence of SEQ ID NO:19, SEQ ID NO:20, SEQ ID NO:21, SEQ ID NO:22, SEQ ID NO:23, SEQ ID NO:24, SEQ ID NO:51, SEQ ID NO:58, SEQ ID NO:65, SEQ ID NO:72, SEQ ID NO:79, SEQ ID NO:83, SEQ ID NO:90, SEQ ID NO:97, SEQ ID NO:104, SEQ ID NO:108, SEQ ID NO:112, SEQ ID NO:119, SEQ ID NO:126, SEQ ID NO:133, or SEQ ID NO:140. In certain embodiments, the arenavirus L as described herein comprises an amino acid sequence that is at least 85% identical to the amino acid sequence of SEQ ID NO:19, SEQ ID NO:20, SEQ ID NO:21, SEQ ID NO:22, SEQ ID NO:23, SEQ ID NO:24, SEQ ID NO:51, SEQ ID NO:58, SEQ ID NO:65, SEQ ID NO:72, SEQ ID NO:79, SEQ ID NO:83, SEQ ID NO:90, SEQ ID NO:97, SEQ ID NO:104, SEQ ID NO:108, SEQ ID NO:112, SEQ ID NO: 119, SEQ ID NO:126, SEQ ID NO:133, or SEQ ID NO:140. In certain embodiments, the arenavirus L as described herein comprises an amino acid sequence that is at least 90% identical to the amino acid sequence of SEQ ID NO:19, SEQ ID NO:20, SEQ ID NO:21, SEQ ID NO:22, SEQ ID NO:23, SEQ ID NO:24, SEQ ID NO:51, SEQ ID NO:58, SEQ ID NO:65, SEQ ID NO:72, SEQ ID NO:79, SEQ ID NO:83, SEQ ID NO:90, SEQ ID NO:97, SEQ ID NO:104, SEQ ID NO:108, SEQ ID NO:112, SEQ ID NO:119, SEQ ID NO:126, SEQ ID NO:133, or SEQ ID NO:140. In certain embodiments, the arenavirus L as described herein comprises an amino acid sequence that is at least 95% identical to the amino acid sequence of SEQ ID NO:19, SEQ ID NO:20, SEQ ID NO:21, SEQ ID NO:22, SEQ ID NO:23, SEQ ID NO:24, SEQ ID NO:51, SEQ ID NO:58, SEQ ID NO:65, SEQ ID NO:72, SEQ ID NO:79, SEQ ID NO:83, SEQ ID NO:90, SEQ ID NO:97, SEQ ID NO:104, SEQ ID NO:108, SEQ ID NO:112, SEQ ID NO:119, SEQ ID NO:126, SEQ ID NO:133, or SEQ ID NO:140. In certain embodiments, the arenavirus L as described herein comprises an amino acid sequence that is at least 96% identical to the amino acid sequence of SEQ ID NO:19, SEQ ID NO:20, SEQ ID NO:21, SEQ ID NO:22, SEQ ID NO:23, SEQ ID NO:24, SEQ ID NO:51, SEQ ID NO:58, SEQ ID NO:65, SEQ ID NO:72, SEQ ID NO:79, SEQ ID NO:83, SEQ ID NO:90, SEQ ID NO:97, SEQ ID NO:104, SEQ ID NO:108, SEQ ID NO:112, SEQ ID NO: 119, SEQ ID NO:126, SEQ ID NO:133, or SEQ ID NO:140. In certain embodiments, the arenavirus L as described herein comprises an amino acid sequence that is at least 97% identical to the amino acid sequence of SEQ ID NO:19, SEQ ID NO:20, SEQ ID NO:21, SEQ ID NO:22, SEQ ID NO:23, SEQ ID NO:24, SEQ ID NO:51, SEQ ID NO:58, SEQ ID NO:65, SEQ ID NO:72, SEQ ID NO:79, SEQ ID NO:83, SEQ ID NO:90, SEQ ID NO:97, SEQ ID NO:104, SEQ ID NO:108, SEQ ID NO:112, SEQ ID NO:119, SEQ ID NO:126, SEQ ID NO:133, or SEQ ID NO:140. In certain embodiments, the arenavirus L as described herein comprises an amino acid sequence that is at least 98% identical to the amino acid sequence of SEQ ID NO:19, SEQ ID NO:20, SEQ ID NO:21, SEQ ID NO:22, SEQ ID NO:23, SEQ ID NO:24, SEQ ID NO:51, SEQ ID NO:58, SEQ ID NO:65, SEQ ID NO:72, SEQ ID NO:79, SEQ ID NO:83, SEQ ID NO:90, SEQ ID NO:97, SEQ ID NO:104, SEQ ID NO:108, SEQ ID NO:112, SEQ ID NO:119, SEQ ID NO:126, SEQ ID NO:133, or SEQ ID NO:140. In certain embodiments, the arenavirus L as described herein comprises an amino acid sequence that is at least 99% identical to the amino acid sequence of SEQ ID NO:19, SEQ ID NO:20, SEQ ID NO:21, SEQ ID NO:22, SEQ ID NO:23, SEQ ID NO:24, SEQ ID NO:51, SEQ ID NO:58, SEQ ID NO:65, SEQ ID NO:72, SEQ ID NO:79, SEQ ID NO:83, SEQ ID NO:90, SEQ ID NO:97, SEQ ID NO:104, SEQ ID NO:108, SEQ ID NO:112, SEQ ID NO: 119, SEQ ID NO:126, SEQ ID NO:133, or SEQ ID NO:140. In certain embodiments, the arenavirus L as described herein comprises an amino acid sequence that is 100% identical to the amino acid sequence of SEQ ID NO:19, SEQ ID NO:20, SEQ ID NO:21, SEQ ID NO:22, SEQ ID NO:23, SEQ ID NO:24, SEQ ID NO:51, SEQ ID NO:58, SEQ ID NO:65, SEQ ID NO:72, SEQ ID NO:79, SEQ ID NO:83, SEQ ID NO:90, SEQ ID NO:97, SEQ ID NO:104, SEQ ID NO:108, SEQ ID NO: 112, SEQ ID NO: 119, SEQ ID NO:126, SEQ ID NO:133, or SEQ ID NO: 140. In certain embodiments, the arenavirus L as described herein comprises an amino acid sequence that is 80% identical to the amino acid sequence of SEQ ID NO:19, SEQ ID NO:20, SEQ ID NO:21, SEQ ID NO:22, SEQ ID NO:23, SEQ ID NO:24, SEQ ID NO:51, SEQ ID NO:58, SEQ ID NO:65, SEQ ID NO:72, SEQ ID NO:79, SEQ ID NO:83, SEQ ID NO:90, SEQ ID NO:97, SEQ ID NO:104, SEQ ID NO:108, SEQ ID NO:112, SEQ ID NO:119, SEQ ID NO:126, SEQ ID NO:133, or SEQ ID NO:140. In certain embodiments, the arenavirus L as described herein comprises an amino acid sequence that is 85% identical to the amino acid sequence of SEQ ID NO:19, SEQ ID NO:20, SEQ ID NO:21, SEQ ID NO:22, SEQ ID NO:23, SEQ ID NO:24, SEQ ID NO:51, SEQ ID NO:58, SEQ ID NO:65, SEQ ID NO:72, SEQ ID NO:79, SEQ ID NO:83, SEQ ID NO:90, SEQ ID NO:97, SEQ ID NO:104, SEQ ID NO:108, SEQ ID NO: 112, SEQ ID NO: 119, SEQ ID NO:126, SEQ ID NO:133, or SEQ ID NO:140. In certain embodiments, the arenavirus L as described herein comprises an amino acid sequence that is 90% identical to the amino acid sequence of SEQ ID NO:19, SEQ ID NO:20, SEQ ID NO:21, SEQ ID NO:22, SEQ ID NO:23, SEQ ID NO:24, SEQ ID NO:51, SEQ ID NO:58, SEQ ID NO:65, SEQ ID NO:72, SEQ ID NO:79, SEQ ID NO:83, SEQ ID NO:90, SEQ ID NO:97, SEQ ID NO:104, SEQ ID NO:108, SEQ ID NO:112, SEQ ID NO:119, SEQ ID NO:126, SEQ ID NO:133, or SEQ ID NO:140. In certain embodiments, the arenavirus L as described herein comprises an amino acid sequence that is 95% identical to the amino acid sequence of SEQ ID NO:19, SEQ ID NO:20, SEQ ID NO:21, SEQ ID NO:22, SEQ ID NO:23, SEQ ID NO:24, SEQ ID NO:51, SEQ ID NO:58, SEQ ID NO:65, SEQ ID NO:72, SEQ ID NO:79, SEQ ID NO:83, SEQ ID NO:90, SEQ ID NO:97, SEQ ID NO:104, SEQ ID NO:108, SEQ ID NO:112, SEQ ID NO:119, SEQ ID NO:126, SEQ ID NO:133, or SEQ ID NO: 140. In certain embodiments, the arenavirus L as described herein comprises an amino acid sequence that is 96% identical to the amino acid sequence of SEQ ID NO:19, SEQ ID NO:20, SEQ ID NO:21, SEQ ID NO:22, SEQ ID NO:23, SEQ ID NO:24, SEQ ID NO:51, SEQ ID NO:58, SEQ ID NO:65, SEQ ID NO:72, SEQ ID NO:79, SEQ ID NO:83, SEQ ID NO:90, SEQ ID NO:97, SEQ ID NO:104, SEQ ID NO:108, SEQ ID NO: 112, SEQ ID NO: 119, SEQ ID NO:126, SEQ ID NO:133, or SEQ ID NO:140. In certain embodiments, the arenavirus L as described herein comprises an amino acid sequence that is 97% identical to the amino acid sequence of SEQ ID NO:19, SEQ ID NO:20, SEQ ID NO:21, SEQ ID NO:22, SEQ ID NO:23, SEQ ID NO:24, SEQ ID NO:51, SEQ ID NO:58, SEQ ID NO:65, SEQ ID NO:72, SEQ ID NO:79, SEQ ID NO:83, SEQ ID NO:90, SEQ ID NO:97, SEQ ID NO:104, SEQ ID NO:108, SEQ ID NO:112, SEQ ID NO:119, SEQ ID NO:126, SEQ ID NO:133, or SEQ ID NO:140. In certain embodiments, the arenavirus L as described herein comprises an amino acid sequence that is 98% identical to the amino acid sequence of SEQ ID NO:19, SEQ ID NO:20, SEQ ID NO:21, SEQ ID NO:22, SEQ ID NO:23, SEQ ID NO:24, SEQ ID NO:51, SEQ ID NO:58, SEQ ID NO:65, SEQ ID NO:72, SEQ ID NO:79, SEQ ID NO:83, SEQ ID NO:90, SEQ ID NO:97, SEQ ID NO:104, SEQ ID NO:108, SEQ ID NO: 112, SEQ ID NO: 119, SEQ ID NO:126, SEQ ID NO:133, or SEQ ID NO:140. In certain embodiments, the arenavirus L as described herein comprises an amino acid sequence that is 99% identical to the amino acid sequence of SEQ ID NO:19, SEQ ID NO:20, SEQ ID NO:21, SEQ ID NO:22, SEQ ID NO:23, SEQ ID NO:24, SEQ ID NO:51, SEQ ID NO:58, SEQ ID NO:65, SEQ ID NO:72, SEQ ID NO:79, SEQ ID NO:83, SEQ ID NO:90, SEQ ID NO:97, SEQ ID NO:104, SEQ ID NO:108, SEQ ID NO:112, SEQ ID NO:119, SEQ ID NO:126, SEQ ID NO:133, or SEQ ID NO:140.

### 5.6.2 Arenavirus Genomic or Antigenomic Segments of the Arenavirus Particle Provided Herein

[0283] In certain embodiments, the arenavirus particle is bi-segmented, namely consists of two arenavirus genomic or antigenomic segments. In certain embodiments, the two arenavirus genomic or antigenomic segments are one S segment and one L segment. In certain embodiments, the arenavirus particle is tri-segmented, namely consists of three arenavirus genomic or antigenomic segments. In certain embodiments, the three arenavirus genomic or antigenomic segments are two S segments and one L segment. In other embodiments, the three arenavirus genomic or antigenomic segments are one S segment and two L segments.

[0284] In certain embodiments, the genome of the arenavirus particle may consist of a) an S segment that encodes a heterologous non-arenaviral signal peptide, arenavirus GP1 and arenavirus GP2 under the control of 3′ UTR, and arenavirus GP signal peptide, a buffer peptide, and a heterologous non-arenaviral polypeptide or arenavirus GP signal peptide and a buffer peptide alone under the control of 5′ UTR; b) an S segment that encodes NP under the control of 3′ UTR, and another heterologous non-arenaviral polypeptide or no polypeptide under the control of 5′ UTR; and c) an L segment that encodes L protein under the control of 3′ UTR, and Z protein under the control of 5′ UTR. In certain embodiments, the two heterologous non-arenaviral polypeptides are the same. In other embodiments, the two heterologous non-arenaviral polypeptides are different from each other. In certain embodiments, the genome of the arenavirus particle may comprise arenavirus genomic or antigenomic segments depicted in FIG. 18A. FIG. 18A shows a general genomic organization, and while the buffer peptide is not present in FIG. 18A, a buffer peptide can be present following the GP signal peptide.

[0285] In certain embodiments, the genome of the arenavirus particle may consist of a) an S segment that encodes a heterologous non-arenaviral polypeptide or no polypeptide under the control of 3′ UTR, and arenavirus GP signal peptide, a buffer peptide, and a heterologous non-arenaviral polypeptide or arenavirus GP signal peptide and a buffer peptide alone under the control of 5′ UTR; b) an S segment that encodes NP under the control of 3′ UTR, and a heterologous non-arenaviral signal peptide, arenavirus GP1 and arenavirus GP2 under the control of 5′ UTR; and c) an L segment that encodes L protein under the control of 3′ UTR, and Z protein under the control of 5′ UTR. In certain embodiments, the two heterologous non-arenaviral polypeptides are the same. In other embodiments, the two heterologous non-arenaviral polypeptides are different from each other. In certain embodiments, the genome of the arenavirus particle may comprise arenavirus genomic or antigenomic segments depicted in FIG. 18B. FIG. 18B shows a general genomic organization and while the buffer peptide is not present in FIG. 18B, a buffer peptide can be present following the GP signal peptide. In certain embodiments, the genome of the arenavirus particle may consist of a) an S segment that encodes (i) an arenavirus GP signal peptide, a buffer peptide, and a first heterologous non-arenaviral polypeptide or (ii) the arenavirus GP signal peptide and the buffer peptide under the control of an arenavirus genomic 3′ UTR and a heterologous non-arenaviral signal peptide, arenavirus GP1 and arenavirus GP2 under the control of an arenavirus genomic 5′ UTR; b) an S segment that encodes NP under the control of an arenavirus genomic 3′ UTR and a second heterologous non-arenaviral polypeptide or no polypeptide under the control of an arenavirus genomic 5′ UTR; and c) an L segment that encodes the L protein under the control of an arenavirus genomic 3′ UTR and the Z protein under the control of an arenavirus genomic 5′ UTR. In some embodiments, the first heterologous non-arenaviral polypeptide and the second heterologous non-arenaviral polypeptide are the same. In some embodiments, the first heterologous non-arenaviral polypeptide and the second heterologous non-arenaviral polypeptide are different from each other.

[0286] In certain embodiments, the genome of the arenavirus particle may consist of a) an S segment that encodes (i) an arenavirus GP signal peptide, a buffer peptide, and a first heterologous non-arenaviral polypeptide or (ii) the arenavirus GP signal peptide and the buffer peptide under the control of an arenavirus genomic 3′ UTR and a second heterologous non-arenaviral polypeptide or no polypeptide under the control of an arenavirus genomic 5′ UTR; b) an S segment that encodes NP under the control of an arenavirus genomic 3′ UTR and a heterologous non-arenaviral signal peptide, arenavirus GP1 and arenavirus GP2 under the control of an arenavirus genomic 5′ UTR; and c) an L segment that encodes the L protein under the control of an arenavirus genomic 3′ UTR and the Z protein under the control of an arenavirus genomic 5′ UTR. In some embodiments, the first heterologous non-arenaviral polypeptide and the second heterologous non-arenaviral polypeptide are the same. In some embodiments, the first heterologous non-arenaviral polypeptide and the second heterologous non-arenaviral polypeptide are different from each other.

[0287] In some embodiments, the GP signal peptide (or functional fragment thereof or polypeptide comprising the GP signal peptide or functional fragment thereof) is cleaved from the buffer peptide. In some embodiments, a peptidase can cleave the GP signal peptide (or functional fragment thereof or polypeptide comprising the GP signal peptide or functional fragment thereof) from the buffer peptide (eg, −5, −4, −3, −2, −1, +1, +2, +3, +4, or +5 amino acid position from the fusion site, or at the fusion site). In some embodiments, an arenavirus particle as described herein wherein the GP signal peptide is fused to a buffer peptide (i) grows to higher titers, and/or (ii) reaches peak titers earlier, and/or (iii) exhibits a higher rescue efficiency (i.e., higher percentage of RCV titer-positive rescues of total rescues), as compared to a control arenavirus particle that has the same genomic organization except it lacks a buffer peptide.

[0288] In certain embodiments, the genome of the arenavirus particle may consist of a) an S segment that encodes arenavirus GP signal peptide, a buffer peptide, and a heterologous non-arenaviral polypeptide or an arenavirus GP signal peptide and a buffer peptide alone under the control of genomic 3′ UTR, and a heterologous non-arenaviral signal peptide, arenavirus GP1 and arenavirus GP2 under the control of genomic 5′ UTR; b) an S segment that encodes NP under the control of genomic 3′ UTR, and another heterologous non-arenaviral polypeptide or no polypeptide under the control of genomic 5′ UTR; and c) an L segment that encodes L protein under the control of 3′ UTR, and Z protein under the control of genomic 5′ UTR. In certain embodiments, the two heterologous non-arenaviral polypeptides are the same. In other embodiments, the two heterologous non-arenaviral polypeptides are different from each other. In certain embodiments, the genome of the arenavirus particle may consist of arenavirus genomic or antigenomic segments depicted in FIG. 18C. FIG. 18C shows a general genomic organization and while the buffer peptide is not present in FIG. 18C, a buffer peptide can be present following the GP signal peptide.

[0289] In certain embodiments, the genome of the arenavirus particle may consist of a) an S segment that encodes a heterologous non-arenaviral polypeptide or no polypeptide under the control of 3′ UTR, and a heterologous non-arenaviral signal peptide, arenavirus GP1 and arenavirus GP2 under the control of 5′ UTR; b) an S segment that encodes NP under the control of 3′ UTR, and arenavirus GP signal peptide, a buffer peptide, and a heterologous non-arenaviral polypeptide or arenavirus GP signal peptide and a buffer peptide alone under the control of 5′ UTR; and c) an L segment that encodes L protein under the control of 3′ UTR, and Z protein under the control of 5′ UTR. In certain embodiments, the two heterologous non-arenaviral polypeptides are the same. In other embodiments, the two heterologous non-arenaviral polypeptides are different from each other. In certain embodiments, the genome of the arenavirus particle may consist of arenavirus genomic or antigenomic segments depicted in FIG. 18D. FIG. 18D shows a general genomic organization and while the buffer peptide is not present in FIG. 18D, a buffer peptide can be present following the GP signal peptide.

[0290] In certain embodiments, the genome of the arenavirus particle may consist of a) an S segment that encodes arenavirus GP signal peptide, a buffer peptide, and a heterologous non-arenaviral polypeptide or arenavirus GP signal peptide and a buffer peptide alone under the control of 3′ UTR, and another heterologous non-arenaviral polypeptide or no polypeptide under the control of 5′ UTR; b) an S segment that encodes NP under the control of 3′ UTR, and a heterologous non-arenaviral signal peptide, arenavirus GP1 and arenavirus GP2 under the control of 5′ UTR; and c) an L segment that encodes L protein under the control of 3′ UTR, and Z protein under the control of 5′ UTR. In certain embodiments, the two heterologous non-arenaviral polypeptides are the same. In other embodiments, the two heterologous non-arenaviral polypeptides are different from each other. In certain embodiments, the genome of the arenavirus particle may consist of arenavirus genomic or antigenomic segments depicted in FIG. 18E. FIG. 18E shows a general genomic organization and while the buffer peptide is not present in FIG. 18E, a buffer peptide can be present following the GP signal peptide.

[0291] In certain embodiments, the genome of the arenavirus particle may consist of a) an S segment that encodes a heterologous non-arenaviral signal peptide, arenavirus GP1 and arenavirus GP2 under the control of 3′ UTR, and a heterologous non-arenaviral polypeptide or no polypeptide under the control of 5′ UTR; b) an S segment that encodes NP under the control of 3′ UTR, and arenavirus GP signal peptide, a buffer peptide, and a heterologous non-arenaviral polypeptide or arenavirus GP signal peptide and a buffer peptide alone under the control of 5′ UTR; and c) an L segment that encodes L protein under the control of 3′ UTR, and Z protein under the control of 5′ UTR. In certain embodiments, the two heterologous non-arenaviral polypeptides are the same. In other embodiments, the two heterologous non-arenaviral polypeptides are different from each other. In certain embodiments, the genome of the arenavirus particle may consist of arenavirus genomic or antigenomic segments depicted in FIG. 18F. FIG. 18F shows a general genomic organization and while the buffer peptide is not present in FIG. 18F, a buffer peptide can be present following the GP signal peptide.

[0292] In certain embodiments, the arenavirus particle comprising the nucleotide sequence described herein is infectious and replication competent. In certain embodiments, the arenavirus particle comprising the nucleotide sequence described herein is attenuated as compared to its parental virus. In certain embodiments, the arenavirus particle comprising the nucleotide sequence described herein is infectious but unable to produce further infectious progeny in non-complementing cells.

[0293] In certain embodiments, the genome of a bi-segmented arenavirus particle may consist of four positions in the arenavirus genomic or antigenomic segments, for example, position 1 is under the control of an arenavirus S segment 5′ UTR; position 2 is under the control of an arenavirus S segment 3′ UTR; position 3 is under the control of an arenavirus L segment 5′ UTR; position 4 is under the control of an arenavirus L segment 3′ UTR. In certain embodiments, positions 1-4 may encode the same polypeptide in two or more positions. In other embodiments, positions 1-4 may each encode a different polypeptide. In certain embodiments, the bi-segmented arenavirus particle comprising positions 1-4 in the arenavirus genomic or antigenomic segments is replication competent. In other embodiments, the bi-segmented arenavirus particle comprising positions 1-4 in the arenavirus genomic or antigenomic segments is replication-defective. In some embodiments, the bi-segmented arenavirus depends on trans-complementation by a genetically engineered helper cell in order to form infectious progeny particles.

[0294] In certain embodiments, the genome of a tri-segmented arenavirus particle may consist of six positions in the arenavirus genomic or antigenomic segments, for example, position 1 is under the control of an arenavirus S segment 5′ UTR; position 2 is under the control of an arenavirus S segment 3′ UTR; position 3 is under the control of an arenavirus S segment 5′ UTR; position 4 under the control of an arenavirus S segment 3′ UTR; position 5 is under the control of an arenavirus L segment 5′ UTR; position 6 is under the control of an arenavirus L segment 3′ UTR. In certain embodiments, positions 1-6 may encode the same polypeptide in two or more positions. In other embodiments, positions 1-6 may each encode a different polypeptide. In certain embodiments, the tri-segmented arenavirus particle comprising positions 1-6 in the arenavirus genomic or antigenomic segments is replication competent. In other embodiments, the tri-segmented arenavirus particle comprising positions 1-6 in the arenavirus genomic or antigenomic segments is replication-defective.

[0295] In certain embodiments, position 1 encodes a heterologous non-arenaviral signal peptide, arenavirus GP1 and GP2. In certain embodiments, position 1 encodes 1) arenavirus GP signal peptide, a buffer peptide, and a heterologous non-arenaviral polypeptide; 2) arenavirus GP signal peptide and a buffer peptide alone; or 3) arenavirus GP signal peptide, a buffer peptide, and NP, Z or L. In certain embodiments, position 1 encodes a heterologous non-arenaviral polypeptide. In certain embodiments, position 1 encodes NP. In certain embodiments, position 1 encodes Z. In certain embodiments, position 1 encodes L. In certain embodiments, position 1 does not encode a polypeptide.

[0296] In certain embodiments, position 2 encodes a heterologous non-arenaviral signal peptide, arenavirus GP1 and GP2. In certain embodiments, position 2 encodes 1) arenavirus GP signal peptide, a buffer peptide, and a heterologous non-arenaviral polypeptide; 2) arenavirus GP signal peptide and a buffer peptide alone; or 3) arenavirus GP signal peptide, a buffer peptide, and NP, Z or L. In certain embodiments, position 2 encodes a heterologous non-arenaviral polypeptide. In certain embodiments, position 2 encodes NP. In certain embodiments, position 2 encodes Z. In certain embodiments, position 2 encodes L. In certain embodiments, position 2 does not encode a polypeptide.

[0297] In certain embodiments, position 3 encodes a heterologous non-arenaviral signal peptide, arenavirus GP1 and GP2. In certain embodiments, position 3 encodes 1) arenavirus GP signal peptide, a buffer peptide, and a heterologous non-arenaviral polypeptide; 2) arenavirus GP signal peptide and a buffer peptide alone; or 3) arenavirus GP signal peptide, a buffer peptide, and NP, Z or L. In certain embodiments, position 3 encodes a heterologous non-arenaviral polypeptide. In certain embodiments, position 3 encodes NP. In certain embodiments, position 3 encodes Z. In certain embodiments, position 3 encodes L. In certain embodiments, position 3 does not encode a polypeptide.

[0298] In certain embodiments, position 4 encodes a heterologous non-arenaviral signal peptide, arenavirus GP1 and GP2. In certain embodiments, position 4 encodes 1) arenavirus GP signal peptide, a buffer peptide, and a heterologous non-arenaviral polypeptide; 2) arenavirus GP signal peptide and a buffer peptide alone; or 3) arenavirus GP signal peptide, a buffer peptide, and NP, Z or L. In certain embodiments, position 4 encodes a heterologous non-arenaviral polypeptide. In certain embodiments, position 4 encodes NP. In certain embodiments, position 4 encodes Z. In certain embodiments, position 4 encodes L. In certain embodiments, position 4 does not encode a polypeptide.

[0299] In certain embodiments, position 5 encodes a heterologous non-arenaviral signal peptide, arenavirus GP1 and GP2. In certain embodiments, position 5 encodes 1) arenavirus GP signal peptide, a buffer peptide, and a heterologous non-arenaviral polypeptide; 2) arenavirus GP signal peptide and a buffer peptide alone; or 3) arenavirus GP signal peptide, a buffer peptide, and NP, Z or L. In certain embodiments, position 5 encodes a heterologous non-arenaviral polypeptide. In certain embodiments, position 5 encodes NP. In certain embodiments, position 5 encodes Z. In certain embodiments, position 5 encodes L. In certain embodiments, position 5 does not encode a polypeptide.

[0300] In certain embodiments, position 6 encodes a heterologous non-arenaviral signal peptide, arenavirus GP1 and GP2. In certain embodiments, position 6 encodes 1) arenavirus GP signal peptide, a buffer peptide, and a heterologous non-arenaviral polypeptide; 2) arenavirus GP signal peptide and a buffer peptide alone; or 3) arenavirus GP signal peptide, a buffer peptide, and NP, Z or L. In certain embodiments, position 6 encodes a heterologous non-arenaviral polypeptide. In certain embodiments, position 6 encodes NP. In certain embodiments, position 6 encodes Z. In certain embodiments, position 6 encodes L. In certain embodiments, position 6 does not encode a polypeptide.

[0301] In certain embodiments, the arenavirus particle is derived from a Lymphocytic choriomeningitis virus (LCMV). In certain embodiments, the LCMV is a MP strain, an Armstrong strain, or an Armstrong Clone 13 strain. In other embodiments, the arenavirus particle is derived from a Lassa virus. In certain embodiments, the arenavirus particle is derived from a Pichinde virus (PICV). In certain embodiments, the arenavirus particle is derived from a Junin virus vaccine Candid #1, or a Junin virus vaccine XJ Clone 3 strain. In certain embodiments, the arenavirus particle is derived from an Oliveros virus. In certain embodiments, the arenavirus particle is derived from a Tamiami virus. In certain embodiments, the arenavirus particle is derived from a Mobala virus. In certain embodiments, the arenavirus particle is derived from a Mopeia virus. In certain embodiments, the arenavirus particle is derived from an Ippy virus. In certain embodiments, the arenavirus particle is derived from an Amapari virus. In certain embodiments, the arenavirus particle is derived from a Flexal virus. In certain embodiments, the arenavirus particle is derived from a Guanarito virus. In certain embodiments, the arenavirus particle is derived from a Latino virus. In certain embodiments, the arenavirus particle is derived from a Machupo virus. In certain embodiments, the arenavirus particle is derived from a Parana virus. In certain embodiments, the arenavirus particle is derived from a Pirital virus. In certain embodiments, the arenavirus particle is derived from a Sabia virus. In certain embodiments, the arenavirus particle is derived from a Tacaribe virus. In certain embodiments, the arenavirus particle is derived from a Bear Canyon virus. In certain embodiments, the arenavirus particle is derived from a Whitewater Arroyo virus. In certain embodiments, the arenavirus particle is derived from a Allpahuayo virus (ALLV). In certain embodiments, the arenavirus particle is derived from an Alxa virus. In certain embodiments, the arenavirus particle is derived from a Chapare virus. In certain embodiments, the arenavirus particle is derived from a Lijiang virus. In certain embodiments, the arenavirus particle is derived from a Cupixi virus. In certain embodiments, the arenavirus particle is derived from a Gairo virus. In certain embodiments, the arenavirus particle is derived from a Loei River virus. In certain embodiments, the arenavirus particle is derived from a Lujo virus. In certain embodiments, the arenavirus particle is derived from a Luna virus. In certain embodiments, the arenavirus particle is derived from a Luli virus. In certain embodiments, the arenavirus particle is derived from a Lunk virus. In certain embodiments, the arenavirus particle is derived from a Mariental virus. In certain embodiments, the arenavirus particle is derived from a Merino Walk virus. In certain embodiments, the arenavirus particle is derived from a Morogoro virus. In certain embodiments, the arenavirus particle is derived from an Okahandja virus. In certain embodiments, the arenavirus particle is derived from an Apore virus. In certain embodiments, the arenavirus particle is derived from a Ryukyu virus. In certain embodiments, the arenavirus particle is derived from a Solwezi virus. In certain embodiments, the arenavirus particle is derived from a souris virus. In certain embodiments, the arenavirus particle is derived from a Wenzhou virus. In certain embodiments, the arenavirus particle is derived from a Big Brushy Tank virus. In certain embodiments, the arenavirus particle is derived from a Catarina virus. In certain embodiments, the arenavirus particle is derived from a Skinner Tank virus. In certain embodiments, the arenavirus particle is derived from a Tonto Creek virus. In certain embodiments, the arenavirus particle is derived from a Xapuri virus.

[0302] In certain embodiments, the growth or infectivity of the arenavirus particle described herein is not inferior to a second arenavirus particle carrying one or more of the same heterologous non-arenaviral polypeptides, and all arenaviral GP, NP, Z and L in the second arenavirus particle are each expressed as one ORF. In certain embodiments, the growth or infectivity of the arenavirus particle described herein is not inferior to a second arenavirus particle. In some embodiments, the second arenavirus particle does not comprise a buffer peptide.

[0303] In certain embodiments, the arenavirus particle comprising the nucleotide sequence described herein is infectious and replication competent. In certain embodiments, the arenavirus particle comprising the nucleotide sequence described herein is attenuated as compared to its parental virus. In certain embodiments, the arenavirus particle comprising the nucleotide sequence described herein is infectious but unable to produce further infectious progeny in non-complementing cells.

### 5.6.3 Compositions and Methods Related to the Nucleotide Sequence Provided Herein

[0304] In certain embodiments, provided herein is a translation product of the mRNA transcripts of the genome of the arenavirus particle provided herein.

[0305] In certain embodiments, provided herein is a cDNA of the mRNA transcript of the genome of the arenavirus particle provided herein, wherein the cDNA can be transcribed into an arenavirus genomic or antigenomic segment.

[0306] In certain embodiments, provided herein is a method of producing an arenavirus genomic or antigenomic segment, wherein the method comprises transcribing the cDNA provided herein.

[0307] In certain embodiments, provided herein is a method of generating an arenavirus particle, wherein the method comprises:
[0308] a) transfecting into a host cell one or more cDNA of the mRNA transcript of the genome of the arenavirus particle provided herein or one or more RNA sequences each transcribed in vitro from the cDNA of the mRNA transcript of the genome of the arenavirus particle provided herein;
[0309] b) transfecting into the host cell nucleotide sequences encoding arenavirus trans-acting factors;
[0310] c) maintaining the host cell under conditions suitable for virus formation; and
[0311] d) harvesting the arenavirus particle.

[0312] In certain embodiments, the one or more cDNA sequences are transcribed using a bidirectional promoter. In certain embodiments, the one or more cDNA sequences are transcribed under the control of a promoter selected from the group consisting of:
[0313] a) a RNA polymerase I promoter;
[0314] b) a RNA polymerase II promoter; and
[0315] c) a T7 promoter.

[0316] In certain embodiments, provided herein is a DNA expression vector comprising the DNA sequence encoding the mRNA transcript of the genome of the arenavirus particle provided herein.

[0317] In certain embodiments, provided herein is a method of rescuing an arenavirus particle using the mRNA transcript of the genome of the arenavirus particle provided herein or the cDNA sequence thereof.

[0318] In certain embodiments, provided herein is a host cell comprising the arenavirus particle provided herein, the translation product provided herein, the cDNA provided herein, or the DNA expression vector provided herein.

[0319] In certain embodiments, provided herein is a vaccine comprising the arenavirus particle provided herein, the translation product provided herein, the cDNA provided herein, or the DNA expression vector provided herein, and a pharmaceutically acceptable carrier.

[0320] In certain embodiments, provided herein is a pharmaceutical composition comprising the arenavirus particle provided herein, the translation product provided herein, the cDNA provided herein, or the DNA expression vector provided herein, and a pharmaceutically acceptable carrier.

### 5.7 Arenavirus Genomic or Antigenomic Segments Provided Herein

[0321] In another aspect, provided herein are arenavirus genomic or antigenomic segments. In certain embodiments, provided herein is an arenavirus genomic or antigenomic segment engineered such that the viral transcription thereof results in a first mRNA transcript and a second mRNA transcript,

wherein the first mRNA transcript comprises a nucleotide sequence encoding a functional fragment of a first polypeptide, and the first mRNA transcript does not encode the full-length first polypeptide;
wherein the second mRNA transcript comprises a nucleotide sequence encoding:
[0322] a) a second polypeptide; or
[0323] b) a functional fragment of the first polypeptide, and the second mRNA transcript does not encode the full-length first polypeptide; or
[0324] c) a functional fragment of a second polypeptide, and the second mRNA transcript does not encode the full-length second polypeptide; or
[0325] d) a heterologous non-arenaviral polypeptide; and
   wherein the first and second polypeptides are different from each other and selected from the group consisting of arenavirus GP, NP, Z and L.

[0326] In certain embodiments, the first mRNA transcript further comprises a nucleotide sequence encoding a second heterologous non-arenaviral polypeptide or a third polypeptide, wherein the third polypeptide is different from the first polypeptide and the second polypeptide and is selected from the group consisting of arenavirus GP, NP, Z and L; and wherein the heterologous non-arenaviral polypeptide and the second heterologous non-arenaviral polypeptide are the same or different from each other.

[0327] In certain embodiments, the second mRNA transcript further comprises a nucleotide sequence encoding a second heterologous non-arenaviral polypeptide or a third polypeptide, wherein the third polypeptide is different from the first polypeptide and the second polypeptide and is selected from the group consisting of arenavirus GP, NP, Z and L; and wherein the heterologous non-arenaviral polypeptide and the second heterologous non-arenaviral polypeptide are the same or different from each other.

[0328] In certain embodiments, the arenavirus GP, NP, Z and L are from LCMV, Lassa virus, Pichinde virus, Oliveros virus, Tamiami virus, Mobala virus, Mopeia virus, Ippy virus, Amapari virus, Flexal virus, Guanarito virus, Latino virus, Machupo virus, Parana virus, Pirital virus, Sabia virus, Tacaribe virus, Bear Canyon virus, Whitewater Arroyo virus, Allpahuayo virus (ALLV), Alxa virus, Chapare virus, Lijiang virus, Cupixi virus, Gairo virus, Loei River virus, Lujo virus, Luna virus, Luli virus, Lunk virus, Mariental virus, Merino Walk virus, Morogoro virus, Okahandja virus, Apore virus, Ryukyu virus, Solwezi virus, souris virus, Wenzhou virus, Big Brushy Tank virus, Catarina virus, Skinner Tank virus, Tonto Creek virus, Xapuri virus, or Junin virus.

[0329] In certain embodiments, provided herein is an arenavirus genomic or antigenomic segment engineered such that the viral transcription thereof results in an mRNA transcript encoding:
[0330] a) a functional fragment of a first polypeptide, and
[0331] b) a heterologous non-arenaviral polypeptide or a second polypeptide;
   wherein the mRNA transcript does not encode the full-length first polypeptide; and wherein the first and second polypeptides are different from each other and selected from the group consisting of arenavirus GP, NP, Z and L.

[0332] In certain embodiments, the mRNA transcript is a first mRNA transcript and the viral transcription of the arenavirus genomic or antigenomic segment further results in a second mRNA transcript. In certain embodiments, the second mRNA transcript comprises a nucleotide sequence encoding a third polypeptide; a functional fragment of a third polypeptide; a functional fragment of the first polypeptide; or a second heterologous non-arenaviral polypeptide; wherein the third polypeptide is different from the first and the second polypeptide and selected from the group consisting of arenavirus GP, NP, Z and L, wherein the second mRNA transcript does not encode the full-length first polypeptide; wherein the second mRNA transcript does not encode the full-length third polypeptide; and wherein the heterologous non-arenaviral polypeptide and the second heterologous non-arenaviral polypeptide are the same or different from each other.

[0333] In certain embodiments, the second mRNA transcript comprises a nucleotide sequence encoding a functional fragment of a first polypeptide, and the functional fragment encoded by the first mRNA transcript is different from the functional fragment encoded by the second mRNA transcript.

[0334] In certain embodiments, the viral transcription of the arenavirus genomic or antigenomic segment does not further result in a second mRNA transcript.

[0335] In certain embodiments, the mRNA transcript comprises an internal ribosome entry site (IRES).

[0336] In certain embodiments, the arenavirus genomic or antigenomic segment is an S segment. In certain embodiments, the arenavirus genomic or antigenomic segment is an L segment.

[0337] In certain embodiments, the functional fragment is under control of an arenavirus 3′ UTR. In certain embodiments, the functional fragment is under control of an arenavirus 5′ UTR.

[0338] In certain embodiments, the first, second and third polypeptides each comprises an amino acid sequence that is at least 80%, 85%, 90%, 95%, 96%, 97%, 98%, 99% or 100% identical to the amino acid sequence of SEQ ID NO:1, SEQ ID NO:2, SEQ ID NO:3, SEQ ID NO:4, SEQ ID NO:5, SEQ ID NO:6, SEQ ID NO:7, SEQ ID NO:8, SEQ ID NO:9, SEQ ID NO:10, SEQ ID NO:11, SEQ ID NO:12, SEQ ID NO:13, SEQ ID NO:14, SEQ ID NO:15, or SEQ ID NO:16, SEQ ID NO:17, SEQ ID NO:18, SEQ ID NO:19, SEQ ID NO:20, SEQ ID NO:21, SEQ ID NO:22, SEQ ID NO:23, SEQ ID NO:24, SEQ ID NO:48, SEQ ID NO:52, SEQ ID NO:59, SEQ ID NO:66, SEQ ID NO:73, SEQ ID NO:80, SEQ ID NO:84, SEQ ID NO:91, SEQ ID NO:98, SEQ ID NO:105, SEQ ID NO:109, SEQ ID NO:113, SEQ ID NO:120, SEQ ID NO:127, SEQ ID NO:134, SEQ ID NO:49, SEQ ID NO:56, SEQ ID NO:63, SEQ ID NO:70, SEQ ID NO:77, SEQ ID NO:81, SEQ ID NO:88, SEQ ID NO:95, SEQ ID NO:102, SEQ ID NO:106, SEQ ID NO:110, SEQ ID NO: 117, SEQ ID NO:124, SEQ ID NO:131, SEQ ID NO:138, SEQ ID NO:50, SEQ ID NO:57, SEQ ID NO:64, SEQ ID NO:71, SEQ ID NO:78, SEQ ID NO:82, SEQ ID NO:89, SEQ ID NO:96, SEQ ID NO:103, SEQ ID NO:107, SEQ ID NO:111, SEQ ID NO:118, SEQ ID NO:125, SEQ ID NO:132, SEQ ID NO:139, SEQ ID NO:51, SEQ ID NO:58, SEQ ID NO:65, SEQ ID NO:72, SEQ ID NO:79, SEQ ID NO:83, SEQ ID NO:90, SEQ ID NO:97, SEQ ID NO:104, SEQ ID NO:108, SEQ ID NO:112, SEQ ID NO:119, SEQ ID NO:126, SEQ ID NO:133, or SEQ ID NO:140.

[0339] In certain embodiments, the first polypeptide comprises an amino acid sequence identical to SEQ ID NO:1, SEQ ID NO:2, SEQ ID NO:3, or SEQ ID NO:4, SEQ ID NO:5, SEQ ID NO:6, SEQ ID NO:48, SEQ ID NO:52, SEQ ID NO:59, SEQ ID NO:66, SEQ ID NO:73, SEQ ID NO:80, SEQ ID NO:84, SEQ ID NO:91, SEQ ID NO:98, SEQ ID NO:105, SEQ ID NO:109, SEQ ID NO:113, SEQ ID NO:120, SEQ ID NO:127, or SEQ ID NO:134.

[0340] In certain embodiments, the functional fragment of the first polypeptide comprises an amino acid sequence that is at least 80%, 85%, 90%, 95%, 96%, 97%, 98%, 99% or 100% identical to the amino acid sequence of SEQ ID NO:25, SEQ ID NO:26, SEQ ID NO:27, SEQ ID NO:28, SEQ ID NO:29, SEQ ID NO:30, SEQ ID NO:31, SEQ ID NO:32, SEQ ID NO:33, SEQ ID NO:142, SEQ ID NO:34, SEQ ID NO:35, SEQ ID NO:36, SEQ ID NO:37, SEQ ID NO:38, SEQ ID NO:39, SEQ ID NO:40, SEQ ID NO:41, SEQ ID NO:42, SEQ ID NO:53, SEQ ID NO:60, SEQ ID NO:67, SEQ ID NO:74, SEQ ID NO:85, SEQ ID NO:92, SEQ ID NO:99, SEQ ID NO: 114, SEQ ID NO:121, SEQ ID NO:128, SEQ ID NO:135, SEQ ID NO:54, SEQ ID NO:61, SEQ ID NO:68, SEQ ID NO:75, SEQ ID NO:86, SEQ ID NO:93, SEQ ID NO:100, SEQ ID NO: 115, SEQ ID NO:122, SEQ ID NO:129, SEQ ID NO:136, SEQ ID NO:55, SEQ ID NO:62, SEQ ID NO:69, SEQ ID NO:76, SEQ ID NO:87, SEQ ID NO:94, SEQ ID NO:101, SEQ ID NO: 116, SEQ ID NO:123, SEQ ID NO:130, SEQ ID NO:137, SEQ ID NO:149, SEQ ID NO:154, SEQ ID NO:161, SEQ ID NO:166, SEQ ID NO:136, SEQ ID NO:143, SEQ ID NO:144, SEQ ID NO: 147, SEQ ID NO:148, SEQ ID NO:152, SEQ ID NO:153, SEQ ID NO:158, SEQ ID NO:159, SEQ ID NO:160, SEQ ID NO:164, SEQ ID NO:165, SEQ ID NO:135, SEQ ID NO:141, SEQ ID NO:142, SEQ ID NO:145, SEQ ID NO:146, SEQ ID NO:150, SEQ ID NO:151, SEQ ID NO:155, SEQ ID NO:156, SEQ ID NO:157, SEQ ID NO:162, or SEQ ID NO: 163.

[0341] In certain embodiments, the functional fragment is an arenavirus GP signal peptide or a functional fragment thereof. In certain embodiments, the functional fragment is an arenavirus GP signal peptide and a buffer peptide, or a functional fragment thereof.

[0342] In certain embodiments, the heterologous non-arenaviral polypeptide, the second heterologous non-arenaviral polypeptide, or both heterologous non-arenaviral polypeptides are each an antigen derived from an infectious organism, tumor, or allergen. In certain embodiments, the antigen is selected from the group consisting of
[0343] (a) viral antigens, and the viral antigen is from a virus family selected from the group consisting of adenoviridae, herpesviridae, leviviridae, orthomyxoviridae, parvoviridae, filoviridae, hantaviridae, poxviridae, papillomaviridae, polyomaviridae, paramyxoviridae, pneumoviridae, picornaviridae, reoviridae, retroviridae, flaviviridae, hepadnaviridae, togaviridae, rhabdoviridae, arenaviridae, and coronaviridae;
[0344] (b) bacterial antigens, and the bacterial antigen is from a bacteria family selected from the group consisting of Aquaspirillum family, Azospirillum family, Azotobacteraceae family, Bacteroidaceae family, Bartonellaceae family, Bdellovibrio family, Campylobacteraceae family, Chlamydiaceae family, Clostridiaceae family, Enterobacteriaceae family, Gardinella family, Pasteurellaceae family, Halobacteriaceae family, Helicobacter family, Legionallaceae family, Listeriaceae family, Methylococcaceae family, mycobacteriaceae, Neisseriaceae family, Oceanospirillum family, Pasteurellaceae family, Streptococcaceae family, Pseudomonadaceae family, Rhizobiaceae family, Spirillum family, Spirosomaceae family, Staphylococcaceae family, Helicobacter family, Yersinia family, Bacillus antracis and Vampirovibrio family, and
[0345] (c) tumor neoantigens or neo-epitopes and tumor associated antigens; and the tumor associated antigen is selected from the group consisting of artificial fusion protein of HPV 16 E7 and E6 proteins, oncogenic viral antigens, cancer-testis antigens, oncofetal antigens, tissue differentiation antigens, mutant protein antigens, Adipophilin, AIM-2, ALDHIAI, BCLX (L), BING-4, CALCA, CD45, CPSF, cyclin DI, DKKI, ENAH (hMcna), Ga733 (EpCAM), EphA3, EZH2, FGF5, glypican-3, G250/MN/CAIX, HER-2/neu, IDOI, IGF2B3, IL13Ralpha2, Intestinal carboxyl esterase, alphafoetoprotein, Kallikrein 4, KIF20A, Lengsin, M-CSF, MCSP, mdm-2, Meloe, MMP-2, MMP-7, MUCI, MUC5AC, p53 (non-mutant), PAX5, PBF, PRAME, PSMA, RAGE, RAGE-I, RGS5, RhoC, RNF43, RU2AS, secernin 1, SOX10, STEAPI (six-transmembrane epithelial antigen of the prostate 1), survivin, Telomerase, VEGF, WT1, EGF-R, CEA, CD20, CD33, CD52, MELANA/MART1, MART2, NY-ESO-1, p53, MAGE Al, MAGE A3, MAGE-4, MAGE-5, MAGE-6, CDK4, alpha-actinin-4, ARTC1, BCR-ABL, BCR-ABL fusion protein (b3a2), B-RAF, CASP-5, CASP-8, beta-catenin, Cdc27, CDK4, CDKN2A, CLPP, COA-1, dek-can fusion protein, EFTUD2, Elongation factor 2, ETV6-AML, ETV6-AML1 fusion protein, FLT3-ITD, FNl, GPNMB, LDLR-fucosyltransferase fusion protein, NFYC, OGT, OS-9, pml-RARalpha fusion protein, PRDX5, PTPRK, H-ras, K-ras (V-Ki-ras2 Kirsten rat sarcoma viral oncogene), N-ras, RBAF600, SIRT2, SNRPD1, SSX, SSX2, SYT-SSXl or -SSX2 fusion protein, TGFbetaRII, Triosephosphate isomerase, ormdm-2, LMP2, HPV E6, HPV E7, EGFRvIII (epidermal growth factor variant III), Idiotype, GD2, ganglioside G2), Ras-mutant, p53 (mutant), Proteinase3 (PRI), Tyrosinase, PSA, hTERT, Sarcoma translocation breakpoints, EphA2, prostatic acid phosphatase PAP, neo-PAP, ML-IAP, AFP, ERG (TMPRSS2 ETS Fusion gene), NAI 7, PAX3, ALK, Androgen Receptor, Cyclin B1, Polysialic acid, MYCN, TRP2, TRP2-Int2, GD3, Fucosyl GMI, Mesothelin, PSCA, sLe(a), cyp1B1, PLACI, GM3, BORIS, Tn, GLoboH, NY-BR-I, SART3, STn, Carbonic Anhydrase IX, OY-TESI, Sperm protein 17, LCK, high molecular weight melanoma-associated antigen (HMWMAA), AKAP-4, SSX2, XAGE 1, B7H3, Legumain, Tie 2, Page4, VEGFR2, MAD-CT-I, FAP, PDGFR-beta, MADCT-2, For-related antigen 1, TRPI, GP100, CA-125, CA19-9, Calretinin, Epithelial membrane antigen (EMA), Epithelial tumor antigen (ETA), CD19, CD34, CD99, CDI 17, Chromogranin, Cytokeratin, Desmin, Glial fibrillary acidic protein (GFAP), gross cystic disease fluid protein (GCDFP-15), HMIB-45 antigen, Myo-D1, muscle-specific actin (MSA), neurofilament, neuronspecific enolase (NSE), placental alkaline phosphatase, synaptophysis, thyroglobulin, thyroid transcription factor-1, dimeric form of the pyruvate kinase isoenzyme type M2 (tumor M2-PK), BAGE BAGE-1, CAGE, CTAGE, FATE, GAGE, GAGE-I, GAGE-2, GAGE-3, GAGE-4, GAGE-5, GAGE-6, GAGE-7, HCA661, HOM-TES-85, MAGEA, MAGEB, MAGEC, NA88, NY-SAR-35, SPANXBI, SPAI 7, SSX, SYCP1, TPTE, Carbohydrate/ganglioside GM2 (oncofetal antigen-immunogenic-1 OFA-I-1), GM3, CA 15-3 (CA 27.29BCAA), CA 195, CA 242, CA 50, CAM 43, CEA, EBNA, EF2, Epstein-Barr virus antigen, HLA-A2, HLA-Al 1, HSP70-2, KIAAO205, MUM-I, MUM-2, MUM-3, Myosin class I, GnTV, Herv-K-mel, LAGE-I, LAGE-2, (sperm protein) SPI 7, SCP-I, P15(58), Hom/Mel-40, E2A-PRL, H4-RET, IGH-IGK, MYL-RAR, TSP-180, P185erbB2, p180erbB-3, c-met, nm-23H1, TAG-72, TAG-72-4, CA-72-4, CAM 17.1, NuMa, 13-catenin, P16, TAGE, CT7, 43-9F, 5T4, 791Tgp72, 13HCG, BCA225, BTAA, CD68KP1, CO-029, HTgp-175, M344, MG7-Ag, MOV18, NB70K, NYCO-1, RCAS1, SDCCAG16, TA-90, TAAL6, TLP, TPS, CD22, CD27, CD30, CD70, prostein, TARP (T cell receptor gamma alternate reading frame protein), Trp-p8, integrin αvβ3 (CD61), galactin, or Ral-B, CD123, CLL-1, CD38, CS-1, CD138, and ROR1.

[0346] In certain embodiments, the first mRNA transcript comprises a nucleotide sequence encoding arenavirus GP signal peptide and a buffer peptide, either alone or fused to a heterologous non-arenaviral polypeptide. In certain embodiments, the second mRNA transcript comprises a nucleotide sequence encoding a heterologous non-arenaviral signal peptide and the arenavirus GP1 and GP2. In certain embodiments, the first mRNA transcript is under control of an arenavirus 3′ UTR and the second mRNA transcript is under control of an arenavirus 5′ UTR.

[0347] In certain embodiments, the first mRNA transcript comprises a nucleotide sequence encoding arenavirus GP signal peptide and a buffer peptide, either alone or fused to a heterologous non-arenaviral polypeptide. In certain embodiments, the second mRNA transcript comprises a nucleotide sequence encoding a heterologous non-arenaviral polypeptide; wherein the heterologous non-arenaviral polypeptide encoded by the first mRNA transcript and the heterologous non-arenaviral polypeptide encoded by the second mRNA transcript are the same or different from each other. In certain embodiments, the first mRNA transcript is under control of an arenavirus 3′ UTR and the second mRNA transcript is under control of an arenavirus 5′ UTR.

[0348] In certain embodiments, the first mRNA transcript comprises a nucleotide sequence encoding a heterologous non-arenaviral signal peptide and the arenavirus GP1 and GP2. In certain embodiments, the second mRNA transcript comprises a nucleotide sequence encoding NP. In certain embodiments, the first mRNA transcript is under control of an arenavirus 5′ UTR and the second mRNA transcript is under control of an arenavirus 3′ UTR.

[0349] In certain embodiments, the heterologous non-arenaviral polypeptide is expressed under control of an arenavirus 3′ UTR or the second heterologous non-arenaviral polypeptide is expressed under control of an arenavirus 3′ UTR; and the expression level of the heterologous non-arenaviral polypeptide or the expression level of the second heterologous non-arenaviral polypeptide is at least about 1%, 2%, 3%, 4%, 5%, 6%, 7%, 8%, 9%, 10%, 15%, 20%, 30%, 40%, 50%, 60%, 70%, 80%, 90%, 100%, 1.5-fold, 2-fold, 3-fold, 4-fold, 5-fold, 6-fold, 7-fold, 8-fold, 9-fold, 10-fold, 12-fold, 15-fold, 18-fold, 20-fold, 25-fold, or 30-fold higher than the expression level of the same heterologous non-arenaviral polypeptide expressed under control of the respective arenavirus 5′ UTR or higher than the expression level of the same second heterologous non-arenaviral polypeptide expressed under control of the respective arenavirus 5′ UTR.

[0350] In certain embodiments, the expression of one heterologous non-arenaviral polypeptide is under control of an arenavirus 3′ UTR and the expression of the other heterologous non-arenaviral polypeptide is under control of an arenavirus 5′ UTR. In certain embodiments, the expression of one heterologous non-arenaviral polypeptide is under control of an arenavirus 3′ UTR in one S segment and the expression of the other heterologous non-arenaviral polypeptide is under control of an arenavirus 5′ UTR in the other S segment. In certain embodiments, cells that are infected with the arenavirus particle of the present disclosure (e.g., expressing one heterologous non-arenaviral polypeptide under control of an arenavirus 3′ UTR in one S segment and expressing another heterologous non-arenaviral polypeptide under control of an arenavirus 5′ UTR in another S segment) express (co-express) both heterologous non-arenaviral polypeptides. In certain embodiments, the combined expression level of the two heterologous non-arenaviral polypeptides (e.g., cells expressing both heterologous non-arenaviral polypeptides) is at least about 1%, 2%, 3%, 4%, 5%, 6%, 7%, 8%, 9%, 10%, 15%, 20%, 30%, 40%5, 0%, 60%, 70%, 80%, 90%1, 00%, 1.5-fold, 2-fold, 3-fold, 4-fold, 5-fold, 6-fold, 7-fold, 8-fold, 9-fold, 10-fold, 12-fold, 15-fold, 18-fold, 20-fold, 25-fold, or 30-fold higher than the combined expression level of the same two heterologous non-arenaviral polypeptides expressed under control of arenavirus 5′ UTRs (e.g., expression of one heterologous non-arenaviral polypeptide is under control of an arenavirus 5′ UTR of one S segment and expression of the other heterologous non-arenaviral polypeptide is under control of an arenavirus 5′ UTR of the other S segment). In certain embodiments, the combined expression level of the two heterologous non-arenaviral polypeptides (e.g., cells expressing both heterologous non-arenaviral polypeptides) is about 1%, 2%, 3%, 4%, 5%, 6%, 7%, 8%, 9%, 10%, 15%, 20%, 30%, 40%, 50%, 60%, 70%, 80%, 90%, 100%, 1.5-fold, 2-fold, 3-fold, 4-fold, 5-fold, 6-fold, 7-fold, 8-fold, 9-fold, 10-fold, 12-fold, 15-fold, 18-fold, 20-fold, 25-fold, or 30-fold higher than the combined expression level of the same two heterologous non-arenaviral polypeptides expressed under control of arenavirus 5′ UTRs (e.g., one heterologous non-arenaviral polypeptide expressed under control of an arenavirus 5′ UTR of one S segment and the other heterologous non-arenaviral polypeptide expressed under control of an arenavirus 5′ UTR of the other S segment). In certain embodiments, the combined expression level of the two heterologous non-arenaviral polypeptides (e.g., cells expressing both heterologous non-arenaviral polypeptides) is 1%, 2%, 3%, 4%, 5%, 6%, 7%, 8%, 9%, 10%, 15%, 20%, 30%, 40%, 50%, 60%, 70%, 80%, 90%, 100%, 1.5-fold, 2-fold, 3-fold, 4-fold, 5-fold, 6-fold, 7-fold, 8-fold, 9-fold, 10-fold, 12-fold, 15-fold, 18-fold, 20-fold, 25-fold, or 30-fold higher than the combined expression level of the same two heterologous non-arenaviral polypeptides expressed under control of arenavirus 5′ UTRs (e.g., one heterologous non-arenaviral polypeptide expressed under control of an arenavirus 5′ UTR of one S segment and the other heterologous non-arenaviral polypeptide expressed under control of an arenavirus 5′ UTR of the other S segment).

[0351] In certain embodiments, provided herein is an arenavirus genomic or antigenomic segment. In certain embodiments, the arenavirus genomic or antigenomic segment provided herein is the nucleotide sequence provided herein (see Section 5.5). In certain embodiments, the nucleotide sequence provided herein (see Section 5.5) is derived from the arenavirus genomic or antigenomic segment described in this Section. In certain embodiments, the transcription of the first ORF (see Section 5.5) may result in the first mRNA transcript described in this Section, whereas the transcription of the second ORF (see Section 5.5) may result in the second mRNA transcript described in the Section. In certain embodiments, the arenavirus particles provided herein (see Section 5.6) comprise the arenavirus genomic or antigenomic segment described in this section.

[0352] In certain embodiments, the arenavirus genomic or antigenomic segment is an S segment. In certain embodiments, the arenavirus genomic or antigenomic segment is an L segment. In certain embodiments, the functional fragment encoded by the arenavirus genomic or antigenomic segment is under control of a 3′ UTR. In other embodiments, the functional fragment encoded by the arenavirus genomic or antigenomic segment is under control of a 5′ UTR.

[0353] In certain embodiments, the first mRNA transcript comprises a nucleotide sequence encoding arenavirus GP signal peptide and a buffer peptide, either alone or fused to a heterologous non-arenaviral polypeptide, and the second mRNA transcript comprises a nucleotide sequence encoding a heterologous non-arenaviral signal peptide, arenavirus GP1 and arenavirus GP2; and the first mRNA transcript is under control of 5′ UTR and the second mRNA transcript is under control of 3′ UTR. In certain embodiments, the arenavirus genomic or antigenomic segment provided herein is one of the S1 segments depicted in FIG. 18A. FIG. 18A shows a general genomic organization and while the buffer peptide is not present in FIG. 18A, a buffer peptide can be present following the GP signal peptide.

[0354] In certain embodiments, the first mRNA transcript comprises a nucleotide sequence encoding arenavirus GP signal peptide and a buffer peptide, either alone or fused to a heterologous non-arenaviral polypeptide, and the second mRNA transcript comprises a nucleotide sequence encoding a heterologous non-arenaviral polypeptide; and the first mRNA transcript is under control of 5′ UTR and the second mRNA transcript is under control of 3′ UTR. In certain embodiments, the first mRNA transcript comprises a nucleotide sequence encoding arenavirus GP signal peptide and a buffer peptide, either alone or fused to a heterologous non-arenaviral polypeptide, and there is no second mRNA transcript; and the first mRNA transcript is under control of 5′ UTR. In certain embodiments, the arenavirus genomic or antigenomic segment provided herein is one of the S1 segments depicted in FIG. 18B. FIG. 18B shows a general genomic organization and while the buffer peptide is not present in FIG. 18B, a buffer peptide can be present following the GP signal peptide.

[0355] In certain embodiments, the first mRNA transcript comprises a nucleotide sequence encoding a heterologous non-arenaviral signal peptide, arenavirus GP1, and arenavirus GP2, and the second mRNA transcript comprises a nucleotide sequence encoding NP; and the first mRNA transcript is under control of 5′ UTR and the second mRNA transcript is under control of 3′ UTR. In certain embodiments, the arenavirus genomic or antigenomic segment provided herein is one of the S2 segments depicted in FIG. 18B or FIG. 18E. FIGS. 18A and 18E show a general genomic organization and while the buffer peptide is not present in FIGS. 18A and 18E, a buffer peptide can be present following the GP signal peptide.

[0356] In certain embodiments, the first mRNA transcript comprises a nucleotide sequence encoding arenavirus GP signal peptide and a buffer peptide, either alone or fused to a heterologous non-arenaviral polypeptide, and the second mRNA transcript comprises a nucleotide sequence encoding a heterologous non-arenaviral signal peptide, arenavirus GP1 and arenavirus GP2; and the first mRNA transcript is under control of 3′ UTR and the second mRNA transcript is under control of 5′ UTR. In certain embodiments, the arenavirus genomic or antigenomic segment provided herein is one of the S1 segments depicted in FIG. 18C. FIG. 18C shows a general genomic organization and while the buffer peptide is not present in FIG. 18C, a buffer peptide can be present following the GP signal peptide.

[0357] In certain embodiments, the first mRNA transcript comprises a nucleotide sequence encoding a heterologous non-arenaviral signal peptide, arenavirus GP1, and arenavirus GP2, and the second mRNA transcript comprises a nucleotide sequence encoding a heterologous non-arenaviral polypeptide; and the first mRNA transcript is under control of 5′ UTR and the second mRNA transcript is under control of 3′ UTR. In certain embodiments, the first mRNA transcript comprises a nucleotide sequence encoding a heterologous non-arenaviral signal peptide, arenavirus GP1, and arenavirus GP2, and there is no second mRNA transcript; and the first mRNA transcript is under control of 5′ UTR. In certain embodiments, the arenavirus genomic or antigenomic segment provided herein is one of the S1 segments depicted in FIG. 18D. FIG. 18D shows a general genomic organization and while the buffer peptide is not present in FIG. 18D, a buffer peptide can be present following the GP signal peptide.

[0358] In certain embodiments, the first mRNA transcript comprises a nucleotide sequence encoding arenavirus GP signal peptide and a buffer peptide, either alone or fused to a heterologous non-arenaviral polypeptide, and the second mRNA transcript comprises a nucleotide sequence encoding NP; and the first mRNA transcript is under control of 5′ UTR and the second mRNA transcript is under control of 3′ UTR. In certain embodiments, the arenavirus genomic or antigenomic segment provided herein is one of the S2 segments depicted in FIG. 18D or FIG. 18F. FIG. 18D or 18F shows a general genomic organization and while the buffer peptide is not present in FIG. 18D or 18F, a buffer peptide can be present following the GP signal peptide.

[0359] In certain embodiments, the first mRNA transcript comprises a nucleotide sequence encoding arenavirus GP signal peptide and a buffer peptide, either alone or fused to a heterologous non-arenaviral polypeptide, and the second mRNA transcript comprises a nucleotide sequence encoding another heterologous non-arenaviral polypeptide; and the two heterologous non-arenaviral polypeptides are the same or different from each other; and the first mRNA transcript is under control of 3′ UTR and the second mRNA transcript is under control of 5′ UTR. In certain embodiments, the first mRNA transcript comprises a nucleotide sequence encoding arenavirus GP signal peptide and a buffer peptide fused to a heterologous non-arenaviral polypeptide, and there is no second mRNA transcript; and the first mRNA transcript is under control of 3′ UTR. In certain embodiments, the arenavirus genomic or antigenomic segment provided herein is one of the S1 segments depicted in FIG. 18E. FIG. 18E shows a general genomic organization and while the buffer peptide is not present in FIG. 18E, a buffer peptide can be present following the GP signal peptide.

[0360] In certain embodiments, the first mRNA transcript comprises a nucleotide sequence encoding a heterologous non-arenaviral signal peptide, arenavirus GP1, and arenavirus GP2, and the second mRNA transcript comprises a nucleotide sequence encoding a heterologous non-arenaviral polypeptide; and the first mRNA transcript is under control of 3′ UTR and the second mRNA transcript is under control of 5′ UTR. In certain embodiments, the first mRNA transcript comprises a nucleotide sequence encoding a heterologous non-arenaviral signal peptide, arenavirus GP1, and arenavirus GP2, and there is no second mRNA transcript; and the first mRNA transcript is under control of 3′ UTR. In certain embodiments, the arenavirus genomic or antigenomic segment provided herein is one of the S1 segments depicted in FIG. 18F. FIG. 18F shows a general genomic organization and while the buffer peptide is not present in FIG. 18F, a buffer peptide can be present following the GP signal peptide.

[0361] Non-limiting examples of the polypeptides encoded by the first and second mRNA transcripts are illustrated in Table 3.

TABLE 3
Non-limiting examples of the polypeptides encoded
by the first and second mRNA transcripts.

| | 1^{st} mRNA transcript | | |
|---|---|---|---|
| | Functional | | |
| | fragment | | Functional |
| | of a first | | fragment |
| | polypeptide | | of a first |
| | and a heterologous | | polypeptide |
| | non-arenaviral | | and a third |
| | polypeptide | | polypeptide |
| | (fused | Functional | (fused |
| | together or | fragment | together or |
| 2^{nd} mRNA | separated | of a first | separated |
| transcript | by an IRES) | polypeptide | by an IRES) |
| Functional fragment | Exemplary | Exemplary | Exemplary |
| of a first polypeptide | combination | combination | combination |
| and a heterologous | | | |
| non-arenaviral | | | |
| polypeptide | | | |
| (fused together or | | | |
| separated by an | | | |
| IRES) | | | |
| Functional fragment | Exemplary | Exemplary | Exemplary |
| of a first polypeptide | combination | combination | combination |
| Functional fragment | Exemplary | Exemplary | Exemplary |
| of a first polypeptide | combination | combination | combination |
| and a third | | | |
| polypeptide | | | |
| (fused together or | | | |
| separated by an | | | |
| IRES) | | | |
| A heterologous non- | Exemplary | Exemplary | Exemplary |
| arenaviral | combination | combination | combination |
| polypeptide | | | |
| A second | Exemplary | Exemplary | Exemplary |
| polypeptide | combination | combination | combination |
| Functional fragment | Exemplary | Exemplary | Exemplary |
| of a second | combination | combination | combination |
| polypeptide and a | | | |
| heterologous non- | | | |
| arenaviral | | | |
| polypeptide | | | |
| (fused together or | | | |
| separated by an | | | |
| IRES) | | | |
| Functional fragment | Exemplary | Exemplary | Exemplary |
| of a second | combination | combination | combination |
| polypeptide | | | |
| Functional fragment | Exemplary | Exemplary | Exemplary |
| of a second | combination | combination | combination |
| polypeptide and a | | | |
| third polypeptide | | | |
| (fused together or | | | |
| separated by an | | | |
| IRES) | | | |

[0362] In certain embodiments, the functional fragment is selected from the group consisting of arenavirus GP signal peptide (and a buffer peptide), arenavirus GP1 and arenavirus GP2. In certain embodiments, non-limiting examples of the polypeptides encoded by the first and second mRNA transcripts related to functional fragments of GP are illustrated in Table 4.

TABLE 4
Non-limiting examples of the polypeptides encoded by the first and
second mRNA transcripts related to functional fragments of GP.

| First mRNA transcript | Second mRNA transcript |
|---|---|
| GP signal peptide, a buffer peptide, and a | A heterologous non-arenaviral signal |
| heterologous non-arenaviral polypeptide | peptide, arenavirus GP1, and arenavirus |
| | GP2 |
| GP signal peptide, a buffer peptide, and a | A heterologous non-arenaviral polypeptide |
| heterologous non-arenaviral polypeptide | |
| GP signal peptide, a buffer peptide, and a | NP |
| heterologous non-arenaviral polypeptide | |
| GP signal peptide, a buffer peptide, and a | Z |
| heterologous non-arenaviral polypeptide | |
| GP signal peptide, a buffer peptide, and a | L |
| heterologous non-arenaviral polypeptide | |
| GP signal peptide, a buffer peptide, and a | No second mRNA transcript |
| heterologous non-arenaviral polypeptide | |
| GP signal peptide and a buffer peptide | A heterologous non-arenaviral signal |
| | peptide, arenavirus GP1, and arenavirus |
| | GP2 |
| GP signal peptide and a buffer peptide | A heterologous non-arenaviral polypeptide |
| GP signal peptide and a buffer peptide | NP |
| GP signal peptide and a buffer peptide | Z |
| GP signal peptide and a buffer peptide | L |
| GP signal peptide and a buffer peptide | No second mRNA transcript |
| GP signal peptide, a buffer peptide, and NP | A heterologous non-arenaviral signal |
| | peptide, arenavirus GP1, and arenavirus |
| | GP2 |
| GP signal peptide, a buffer peptide, and NP | A heterologous non-arenaviral polypeptide |
| GP signal peptide, a buffer peptide, and NP | Z |
| GP signal peptide, a buffer peptide, and NP | L |
| GP signal peptide, a buffer peptide, and NP | No second mRNA transcript |
| GP signal peptide, a buffer peptide, and Z | A heterologous non-arenaviral signal |
| | peptide, arenavirus GP1, and arenavirus |
| | GP2 |
| GP signal peptide, a buffer peptide, and Z | A heterologous non-arenaviral polypeptide |
| GP signal peptide, a buffer peptide, and Z | NP |
| GP signal peptide, a buffer peptide, and Z | L |
| GP signal peptide, a buffer peptide, and Z | No second mRNA transcript |
| GP signal peptide, a buffer peptide, and L | A heterologous non-arenaviral signal |
| | peptide, arenavirus GP1, and arenavirus |
| | GP2 |
| GP signal peptide, a buffer peptide, and L | A heterologous non-arenaviral polypeptide |
| GP signal peptide, a buffer peptide, and L | NP |
| GP signal peptide, a buffer peptide, and L | Z |
| GP signal peptide, a buffer peptide, and L | No second mRNA transcript |
| GP1, GP2 and a heterologous non- | GP signal peptide, a buffer peptide, and a |
| arenaviral signal peptide | heterologous non-arenaviral polypeptide |
| GP1, GP2 and a heterologous non- | GP signal peptide and a buffer peptide |
| arenaviral signal peptide | |
| GP1, GP2 and a heterologous non- | A heterologous non-arenaviral polypeptide |
| arenaviral signal peptide | |
| GP1, GP2 and a heterologous non- | NP |
| arenaviral signal peptide | |
| GP1, GP2 and a heterologous non- | Z |
| arenaviral signal peptide | |
| GP1, GP2 and a heterologous non- | L |
| arenaviral signal peptide | |
| GP1, GP2 and a heterologous non- | No second mRNA transcript |
| arenaviral signal peptide | |

### 5.7.1 Arenavirus Particle Comprising the Arenavirus Genomic or Antigenomic Segment Provided Herein

[0363] In certain embodiments, provided herein is an arenavirus particle comprising the arenavirus genomic or antigenomic segment provided herein.

[0364] In certain embodiments, the genome of the arenavirus particle consists of an S segment and an L segment.

[0365] In certain embodiments, the arenavirus particle is tri-segmented. In certain embodiments, the tri-segmented arenavirus particle comprises two S segments and an L segment. In certain embodiments, the tri-segmented arenavirus particle comprises an S segment and two L segments.

[0366] In certain embodiments, the genome of the arenavirus particle consists of
[0367] a) an S segment that encodes arenavirus GP signal peptide, a buffer peptide, and a heterologous non-arenaviral polypeptide or arenavirus GP signal peptide and a buffer peptide alone under the control of an arenavirus 3′ UTR and a heterologous non-arenaviral signal peptide, arenavirus GP1 and arenavirus GP2 under the control of an arenavirus 5′ UTR;
[0368] b) an S segment that encodes NP under the control of an arenavirus 3′ UTR and another heterologous non-arenaviral polypeptide or no polypeptide under the control of an arenavirus 5′ UTR; and
[0369] c) an L segment that encodes L protein under the control of an arenavirus 3′ UTR and Z protein under the control of an arenavirus 5′ UTR; and
   wherein the two heterologous non-arenaviral polypeptides are the same or different from each other.

[0370] In certain embodiments, the genome of the arenavirus particle consists of
[0371] a) an S segment that encodes arenavirus GP signal peptide, a buffer peptide, and a heterologous non-arenaviral polypeptide or arenavirus GP signal peptide and a buffer peptide alone under the control of an arenavirus 3′ UTR and another heterologous non-arenaviral polypeptide or no polypeptide under the control of an arenavirus 5′ UTR;
[0372] b) an S segment that encodes NP under the control of an arenavirus 3′ UTR and a heterologous non-arenaviral signal peptide, arenavirus GP1 and arenavirus GP2 under the control of an arenavirus 5′ UTR; and
[0373] c) an L segment that encodes L protein under the control of an arenavirus 3′ UTR and Z protein under the control of an arenavirus 5′ UTR; and
   wherein the two heterologous non-arenaviral polypeptides are the same or different from each other.

[0374] In certain embodiments, the genome of the arenavirus particle consists of
[0375] a) an S segment that encodes (i) an arenavirus GP signal peptide, a buffer peptide, and a first heterologous non-arenaviral polypeptide or (ii) the arenavirus GP signal peptide and the buffer peptide under the control of an arenavirus genomic 3′ UTR and a heterologous non-arenaviral signal peptide, arenavirus GP1 and arenavirus GP2 under the control of an arenavirus genomic 5′ UTR;
[0376] b) an S segment that encodes NP under the control of an arenavirus genomic 3′ UTR and a second heterologous non-arenaviral polypeptide or no polypeptide under the control of an arenavirus genomic 5′ UTR; and
[0377] c) an L segment that encodes the L protein under the control of an arenavirus genomic 3′ UTR and the Z protein under the control of an arenavirus genomic 5′ UTR; wherein the first heterologous non-arenaviral polypeptide and the second heterologous non-arenaviral polypeptide are the same or different from each other.

[0378] In certain embodiments, the genome of the arenavirus particle consists of
[0379] a) an S segment that encodes (i) an arenavirus GP signal peptide, a buffer peptide, and a first heterologous non-arenaviral polypeptide or (ii) the arenavirus GP signal peptide and the buffer peptide under the control of an arenavirus genomic 3′ UTR and a second heterologous non-arenaviral polypeptide or no polypeptide under the control of an arenavirus genomic 5′ UTR;
[0380] b) an S segment that encodes NP under the control of an arenavirus genomic 3′ UTR and a heterologous non-arenaviral signal peptide, arenavirus GP1 and arenavirus GP2 under the control of an arenavirus genomic 5′ UTR; and
[0381] c) an L segment that encodes the L protein under the control of an arenavirus genomic 3′ UTR and the Z protein under the control of an arenavirus genomic 5′ UTR; wherein the first heterologous non-arenaviral polypeptide and the second heterologous non-arenaviral polypeptide are the same or different from each other.

[0382] In certain embodiments, the arenavirus particle is derived from a Lassa virus. In certain embodiments, the arenavirus particle is derived from a Lymphocytic choriomeningitis virus (LCMV). In certain embodiments, the LCMV is a MP strain, a WE strain, an Armstrong strain, or an Armstrong Clone 13 strain. In certain embodiments, the arenavirus particle is derived from a New World arenavirus of Clade A. In certain embodiments, the arenavirus particle is derived from a Pichinde virus (PICV). In certain embodiments, the arenavirus particle is derived from a Junin virus vaccine Candid #1, or a Junin virus vaccine XJ Clone 3 strain. In certain embodiments, the arenavirus particle is derived from an Oliveros virus. In certain embodiments, the arenavirus particle is derived from a Tamiami virus. In certain embodiments, the arenavirus particle is derived from a Mobala virus. In certain embodiments, the arenavirus particle is derived from a Mopeia virus. In certain embodiments, the arenavirus particle is derived from an Ippy virus. In certain embodiments, the arenavirus particle is derived from an Amapari virus. In certain embodiments, the arenavirus particle is derived from a Flexal virus. In certain embodiments, the arenavirus particle is derived from a Guanarito virus. In certain embodiments, the arenavirus particle is derived from a Latino virus. In certain embodiments, the arenavirus particle is derived from a Machupo virus. In certain embodiments, the arenavirus particle is derived from a Parana virus. In certain embodiments, the arenavirus particle is derived from a Pirital virus. In certain embodiments, the arenavirus particle is derived from a Sabia virus. In certain embodiments, the arenavirus particle is derived from a Tacaribe virus. In certain embodiments, the arenavirus particle is derived from a Bear Canyon virus. In certain embodiments, the arenavirus particle is derived from a Whitewater Arroyo virus. In certain embodiments, the arenavirus particle is derived from an Allpahuayo virus (ALLV). In certain embodiments, the arenavirus particle is derived from an Alxa virus. In certain embodiments, the arenavirus particle is derived from a Chapare virus. In certain embodiments, the arenavirus particle is derived from a Lijiang virus. In certain embodiments, the arenavirus particle is derived from a Cupixi virus. In certain embodiments, the arenavirus particle is derived from a Gairo virus. In certain embodiments, the arenavirus particle is derived from a Loei River virus. In certain embodiments, the arenavirus particle is derived from a Lujo virus. In certain embodiments, the arenavirus particle is derived from a Luna virus. In certain embodiments, the arenavirus particle is derived from a Luli virus. In certain embodiments, the arenavirus particle is derived from a Lunk virus. In certain embodiments, the arenavirus particle is derived from a Mariental virus. In certain embodiments, the arenavirus particle is derived from a Merino Walk virus. In certain embodiments, the arenavirus particle is derived from a Morogoro virus. In certain embodiments, the arenavirus particle is derived from an Okahandja virus. In certain embodiments, the arenavirus particle is derived from an Apore virus. In certain embodiments, the arenavirus particle is derived from a Ryukyu virus. In certain embodiments, the arenavirus particle is derived from a Solwezi virus. In certain embodiments, the arenavirus particle is derived from a souris virus. In certain embodiments, the arenavirus particle is derived from a Wenzhou virus. In certain embodiments, the arenavirus particle is derived from a Big Brushy Tank virus. In certain embodiments, the arenavirus particle is derived from a Catarina virus. In certain embodiments, the arenavirus particle is derived from a Skinner Tank virus. In certain embodiments, the arenavirus particle is derived from a Tonto Creek virus. In certain embodiments, the arenavirus particle is derived from a Xapuri virus.

[0383] In certain embodiments, the genome of the arenavirus particle encodes the heterologous non-arenaviral polypeptide and/or the second heterologous non-arenaviral polypeptide, and the growth or infectivity of the arenavirus particle is not inferior to a second arenavirus particle, wherein the genome of the second arenavirus particle encodes the same heterologous non-arenaviral polypeptide and/or the same second heterologous non-arenaviral polypeptide; and wherein all arenaviral GP, NP, Z and L in the second arenavirus particle are each expressed as one ORF. In certain embodiments, the growth or infectivity of the arenavirus particle described herein is not inferior to a second arenavirus particle. In some embodiments, the genome of the second arenavirus particle does not encode a buffer peptide.

[0384] In certain embodiments, the arenavirus particle is infectious and replication competent. In certain embodiments, the arenavirus particle is attenuated as compared to its parental wild-type virus. In certain embodiments, the arenavirus particle is infectious but unable to produce further infectious progeny in non-complementing cells.

[0385] In certain embodiments, the titer of the arenavirus particle of the disclosure is at least about 1%, 2%, 3%, 4%, 5%, 6%, 7%, 8%, 9%, 10%, 15%, 20%, 30%, 40%, 50%, 60%, 70%, 80%, 90%, 100%, 1.5-fold, 2-fold, 3-fold, 4-fold, 5-fold, 6-fold, 7-fold, 8-fold, 9-fold, 10-fold, 12-fold, 15-fold, 18-fold, 20-fold, 25-fold, or 30-fold lower during a persistent infection in AGRAG mice than the titer of the respective wild-type parental arenavirus particle.

[0386] In certain embodiments, the arenavirus particle of the disclosure expresses a heterologous non-arenaviral polypeptide under control of an arenavirus 3′ UTR; wherein the arenavirus particle induces at least about 1%, 2%, 3%, 4%, 5%, 6%, 7%, 8%, 9%, 10%, 15%, 20%, 30%, 40%, 50%, 60%, 70%, 80%, 90%, 100%, 1.5-fold, 2-fold, 3-fold, 4-fold, 5-fold, 6-fold, 7-fold, 8-fold, 9-fold, 10-fold, 12-fold, 15-fold, 18-fold, 20-fold, 25-fold, or 30-fold higher immune responses against the heterologous non-arenaviral polypeptide than another arenavirus particle expressing the same heterologous non-arenaviral polypeptide under control of an arenavirus 5′ UTR. In some embodiments, the another arenavirus particle does not comprise a buffer peptide. In some embodiments, an immune response (e.g., a higher immune response) is obtained after an arenavirus particle of the present disclosure (e.g., arenavirus particle expressing a heterologous non-arenaviral polypeptide under control of an arenavirus 3′ UTR) is administered to a subject. In some embodiments, an immune response is obtained after an arenavirus particle expressing the heterologous non-arenaviral polypeptide under control of an arenavirus 5′ UTR is administered to a subject or to a comparable subject. In some embodiments, an immune response obtained after an arenavirus particle of the present disclosure is administered to a subject is compared to an immune response obtained after another arenavirus particle (e.g., arenavirus particle expressing the heterologous non-arenaviral polypeptide under control of an arenavirus 5′ UTR) is administered to a subject or to a comparable subject. In some embodiments, the subject and/or the comparable subject is a subject in need of treatment. In some embodiments, the subject and/or the comparable subject is a subject with a disease and/or with symptoms of a disease. In some embodiments, the comparable subject is a healthy subject. In some embodiments, the comparable subject is a subject without the disease. In some embodiments, the comparable subject is a subject not in need of treatment.

[0387] In certain embodiments, at least about, or about, 5%, 10%, 15%, 20%, 25%, 30%, 35%, 40%, 4%5% 50%, 55%, 60%, 65%, 70%, 75%, 80%, 85%, 90%, 95%, 99%, or 100% of cells express the two heterologous non-arenaviral polypeptides after an arenavirus particle of the present disclosure (e.g., expressing one heterologous non-arenaviral polypeptide under control of an arenavirus 3′ UTR) is introduced to (or infects) the cells (e.g., to a population of cells). In certain embodiments, the proportion of cells that express the heterologous non-arenaviral polypeptides after an arenavirus particle of the present disclosure (e.g., expressing one heterologous non-arenaviral polypeptide under control of an arenavirus 3′ UTR in one S segment) is introduced to (or infects) a population of cells is higher as compared to the proportion of cells that express the heterologous non-arenaviral polypeptides after an arenavirus particle expressing the same heterologous non-arenaviral polypeptides under control of arenavirus 5′ UTR is introduced to (or infects) a population of cells. In certain embodiments, at least about 1%, 2%, 3%, 4%, 5%, 6%, 7%, 8%, 9%, 10%, 15%, 20%, 25%, 30%, 35%, 40%, 45%, 50%, 55%, 60%, 65%, 70%, 75%, 80%, 85%, 90%, 95%, 99%, or 100% more cells express the heterologous non-arenaviral polypeptides after an arenavirus particle of the present disclosure (e.g., expressing one heterologous non-arenaviral polypeptide under control of an arenavirus 3′ UTR in one S segment) is introduced to (or infects) a population of cells as compared to the proportion of cells that express the heterologous non-arenaviral polypeptides after an arenavirus particle expressing the same heterologous non-arenaviral polypeptides under control of arenavirus 5′ UTR is introduced to (or infects) a comparable population of cells.

[0388] In certain embodiments, at least about, or about, 5%, 10%, 15%, 20%, 25%, 30%, 35%, 40%, 4%5% 50%, 55%, 60%, 6% 5, ⁷⁰, 75%, 80%, 85%, 90%, 95%, 99%, or 100% of cells express (e.g., co-express) the two heterologous non-arenaviral polypeptides after an arenavirus particle of the present disclosure (e.g., expressing one heterologous non-arenaviral polypeptide under control of an arenavirus 3′ UTR in one S segment and expressing another heterologous non-arenaviral polypeptide under control of an arenavirus 5′ UTR in another S segment) is introduced to (or infects) the cells (e.g., to a population of cells). In certain embodiments, the proportion of cells that express (e.g., co-express) the two heterologous non-arenaviral polypeptides after an arenavirus particle of the present disclosure (e.g., expressing one heterologous non-arenaviral polypeptide under control of an arenavirus 3′ UTR in one S segment and expressing another heterologous non-arenaviral polypeptide under control of an arenavirus 5′ UTR in another S segment) is introduced to (or infects) a population of cells is higher as compared to the proportion of cells that express (e.g., co-express) the two heterologous non-arenaviral polypeptides after an arenavirus particle expressing the same two heterologous non-arenaviral polypeptides under control of arenavirus 5′ UTRs (e.g., expressing one heterologous non-arenaviral polypeptide under control of an arenavirus 5′ UTR of one S segment and expressing the other heterologous non-arenaviral polypeptide under control of an arenavirus 5′ UTR of the other S segment) is introduced to (or infects) a population of cells. In certain embodiments, at least about 1%, 2%, 3%, 4%, 5%, 6%, 7%, 8%, 9%0, 10%, 15%, 20%, 25%, 30%, 35%, 40%, 45%, 50%, 55%, 60%, 65%, 70%, 75%, 80%, 85%, 90%, 95%, 99%, or 100% more cells express (e.g., co-express) the two heterologous non-arenaviral polypeptides after an arenavirus particle of the present disclosure (e.g., expressing one heterologous non-arenaviral polypeptide under control of an arenavirus 3′ UTR in one S segment and expressing another heterologous non-arenaviral polypeptide under control of an arenavirus 5′ UTR in another S segment) is introduced to (or infects) a population of cells as compared to the proportion of cells that express (e.g., co-express) the two heterologous non-arenaviral polypeptides after an arenavirus particle expressing the same two heterologous non-arenaviral polypeptides under control of arenavirus 5′ UTRs (e.g., expressing one heterologous non-arenaviral polypeptide under control of an arenavirus 5′ UTR of one S segment and expressing the other heterologous non-arenaviral polypeptide under control of an arenavirus 5′ UTR of the other S segment) is introduced to (or infects) a comparable population of cells.

### 5.7.2 Compositions and Methods Related to the Nucleotide Sequence Provided Herein

[0389] In certain embodiments, provided herein is a translation product of the arenavirus genomic or antigenomic segment provided herein.

[0390] In certain embodiments, provided herein is a cDNA of the arenavirus genomic or antigenomic segment provided herein.

[0391] In certain embodiments, provided herein is a method of producing an arenavirus genomic or antigenomic segment, wherein the method comprises transcribing the cDNA provided herein.

[0392] In certain embodiments, provided herein is a method of generating an arenavirus particle, wherein the method comprises:
[0393] a) transfecting into a host cell one or more cDNA sequences of the arenavirus genomic or antigenomic segment provided herein or one or more RNA sequences each transcribed in vitro from the cDNA sequence of the arenavirus genomic or antigenomic segment provided herein;
[0394] b) transfecting into the host cell nucleotide sequences encoding arenavirus trans-acting factors;
[0395] c) maintaining the host cell under conditions suitable for virus formation; and
[0396] d) harvesting the arenavirus particle.

[0397] In certain embodiments, the one or more cDNA sequences are transcribed using a bidirectional promoter. In certain embodiments, the one or more cDNA sequences are transcribed under the control of a promoter selected from the group consisting of:
[0398] a) a RNA polymerase I promoter;
[0399] b) a RNA polymerase II promoter; and
[0400] c) a T7 promoter.

[0401] In certain embodiments, provided herein is a DNA expression vector comprising a DNA sequence encoding the arenavirus genomic or antigenomic segment provided herein.

[0402] In certain embodiments, provided herein is a method of rescuing an arenavirus particle using the arenavirus genomic or antigenomic segment provided herein or a DNA sequence encoding the arenavirus genomic or antigenomic segment.

[0403] In certain embodiments, provided herein is a host cell comprising the arenavirus genomic or antigenomic segment provided herein, the translation product provided herein, the arenavirus particle provided herein, or the DNA expression vector provided herein.

[0404] In certain embodiments, provided herein is a vaccine comprising the arenavirus genomic or antigenomic segment provided herein, the translation product provided herein, the arenavirus particle provided herein, or the DNA expression vector provided herein, and a pharmaceutically acceptable carrier.

[0405] In certain embodiments, provided herein is a pharmaceutical composition comprising the arenavirus genomic or antigenomic segment provided herein, the translation product provided herein, the arenavirus particle provided herein, or the DNA expression vector provided herein, and a pharmaceutically acceptable carrier.

### 5.8 Translation Product Provided Herein

[0406] In certain embodiments, provided herein is a translation product of the nucleotide sequence provided herein (see Section 5.5). In certain embodiments, provided herein is a translation product of the mRNA transcript of the genome of the arenavirus particle provided herein (see Section 5.6). In certain embodiments, provided herein is a translation product of the arenavirus genomic or antigenomic segment provided herein (see Section 5.7).

[0407] In certain embodiments, the translation product is a chimeric protein. In certain embodiments, the translation product comprises a functional fragment (see Section 5.2) of a polypeptide provided herein (see Section 5.1) fused to a heterologous non-arenaviral polypeptide (see Section 5.3). In certain embodiments, the translation product comprises a functional fragment (see Section 5.2) of a polypeptide provided herein (see Section 5.1) fused to another polypeptide provided herein (see Section 5.1). In certain embodiments, the translation product comprises a functional fragment (see Section 5.2) of a polypeptide provided herein (see Section 5.1) fused to another functional fragment of the same polypeptide or another polypeptide provided herein (see Section 5.1). In certain embodiments, the translation product comprises a functional fragment (see Section 5.2) of a polypeptide provided herein (see Section 5.1). In certain embodiments, the translation product comprises a heterologous non-arenaviral polypeptide (see Section 5.3). In certain embodiments, the translation product comprises a polypeptide provided herein (see Section 5.1).

[0408] In certain embodiments, the translation product provided herein is a translation product of any one of the first or the second ORFs listed in Table 1. In certain embodiments, the translation product provided herein is a translation product of any one of the first or the second ORFs listed in Table 2. In certain embodiments, the translation product provided herein is a translation product of any one of the first or the second mRNA transcripts listed in Table 3. In certain embodiments, the translation product provided herein is a translation product of any one of the first or the second mRNA transcripts listed in Table 4.

[0409] In certain embodiments, the translation product provided herein is a translation product of any one of the arenavirus genomic or antigenomic segments depicted in any one of FIGS. 18A-18F.

### 5.9 Vector Systems And Cell Lines

[0410] In certain embodiments, provided herein are DNAs comprising or consisting of the nucleotide sequence as described in Section 5.5. In certain embodiments, provided herein is an arenavirus genomic or antigenomic segment as described in Section 5.7. In certain embodiments, provided herein is an arenavirus genomic or antigenomic segment in the arenavirus particle as described in Section 5.6. In certain embodiments, provided herein is a DNA sequence encoding the mRNA transcript in the arenavirus particle as described in Section 5.6. In certain embodiments, the DNA is a cDNA.

[0411] In one embodiment, provided herein is a DNA expression vector comprising the nucleotide sequence as described in Section 5.5. In one embodiment, provided herein is a DNA expression vector comprising a cDNA encoding an arenavirus genomic or antigenomic segment as described in Section 5.7. In one embodiment, provided herein is a DNA expression vector comprising a cDNA encoding the arenavirus genomic or antigenomic segment in the arenavirus particle as described in Section 5.6. In certain embodiments, provided herein is a DNA expression vector comprising a cDNA of the mRNA transcript in the arenavirus particle as described in Section 5.6.

[0412] In one embodiment, provided herein is a DNA expression vector system that encodes the bi-segmented or tri-segmented arenavirus particle as described herein. Specifically, provided herein is a DNA expression vector system wherein one or more vectors encode two or three arenavirus genomic or antigenomic segments, namely, one L segment and one S section of a bi-segmented arenavirus as described herein, or one L segment and two S segments or two L segments and one S segment of a tri-segmented arenavirus particle described herein. Such a vector system can encode one or more separate DNA molecules.

[0413] In another embodiment, provided herein is a DNA or cDNA of the arenavirus S segment(s) as described in Section 5.7, and is part of or incorporated into a DNA expression system. In other embodiments, a DNA or cDNA of the arenavirus L segment(s) as described in Section 5.7 is part of or incorporated into a DNA expression system.

[0414] In certain embodiments, the DNA provided herein can be derived from a particular strain of LCMV. Strains of LCMV include Clone 13, MP strain, Arm CA 1371, Arm E-250, WE, UBC, Traub, Pasteur, 810885, CH-5692, Marseille #12, HP65-2009, 200501927, 810362, 811316, 810316, 810366, 20112714, Douglas, GR01, SN05, CABN and their derivatives. In specific embodiments, the cDNA is derived from LCMV Clone 13. In other specific embodiments, the cDNA is derived from LCMV MP strain.

[0415] In certain embodiments, the DNA or cDNA provided herein can be derived from a particular strain of Lassa virus. In certain embodiments, the DNA or cDNA provided herein can be derived from a particular strain of Pichinde virus. In certain embodiments, the DNA or cDNA provided herein can be derived from a particular strain of Junin virus. In certain embodiments, the DNA or cDNA provided herein can be derived from a particular strain of Oliveros virus. In certain embodiments, the DNA or cDNA provided herein can be derived from a particular strain of Tamiami virus. In certain embodiments, the DNA or cDNA provided herein can be derived from a particular strain of Mobala virus. In certain embodiments, the DNA or cDNA provided herein can be derived from a particular strain of Mopeia virus. In certain embodiments, the DNA or cDNA provided herein can be derived from a particular strain of Ippy virus. In certain embodiments, the DNA or cDNA provided herein can be derived from a particular strain of Amapari virus. In certain embodiments, the DNA or cDNA provided herein can be derived from a particular strain of Flexal virus. In certain embodiments, the DNA or cDNA provided herein can be derived from a particular strain of Guanarito virus. In certain embodiments, the DNA or cDNA provided herein can be derived from a particular strain of Latino virus. In certain embodiments, the cDNA provided herein can be derived from a particular strain of Machupo virus. In certain embodiments, the DNA or cDNA provided herein can be derived from a particular strain of Parana virus. In certain embodiments, the DNA or cDNA provided herein can be derived from a particular strain of Pirital virus. In certain embodiments, the DNA or cDNA provided herein can be derived from a particular strain of Sabia virus. In certain embodiments, the DNA or cDNA provided herein can be derived from a particular strain of Tacaribe virus. In certain embodiments, the DNA or cDNA provided herein can be derived from a particular strain of Bear Canyon virus. In certain embodiments, the DNA or cDNA provided herein can be derived from a particular strain of Whitewater Arroyo virus. In certain embodiments, the DNA or cDNA provided herein can be derived from a particular strain of Allpahuayo virus (ALLV). In certain embodiments, the DNA or cDNA provided herein can be derived from a particular strain of Alxa virus. In certain embodiments, the DNA or cDNA provided herein can be derived from a particular strain of Chapare virus. In certain embodiments, the DNA or cDNA provided herein can be derived from a particular strain of Lijiang virus. In certain embodiments, the DNA or cDNA provided herein can be derived from a particular strain of Cupixi virus. In certain embodiments, the DNA or cDNA provided herein can be derived from a particular strain of Gairo virus. In certain embodiments, the DNA or cDNA provided herein can be derived from a particular strain of Loei River virus. In certain embodiments, the DNA or cDNA provided herein can be derived from a particular strain of Lujo virus. In certain embodiments, the DNA or cDNA provided herein can be derived from a particular strain of Luna virus. In certain embodiments, the DNA or cDNA provided herein can be derived from a particular strain of Luli virus. In certain embodiments, the DNA or cDNA provided herein can be derived from a particular strain of Lunk virus. In certain embodiments, the DNA or cDNA provided herein can be derived from a particular strain of Mariental virus. In certain embodiments, the DNA or cDNA provided herein can be derived from a particular strain of Merino Walk virus. In certain embodiments, the DNA or cDNA provided herein can be derived from a particular strain of Morogoro virus. In certain embodiments, the DNA or cDNA provided herein can be derived from a particular strain of Okahandja virus. In certain embodiments, the DNA or cDNA provided herein can be derived from a particular strain of Apore virus. In certain embodiments, the DNA or cDNA provided herein can be derived from a particular strain of Ryukyu virus. In certain embodiments, the DNA or cDNA provided herein can be derived from a particular strain of Solwezi virus. In certain embodiments, the DNA or cDNA provided herein can be derived from a particular strain of souris virus. In certain embodiments, the DNA or cDNA provided herein can be derived from a particular strain of Wenzhou virus. In certain embodiments, the DNA or cDNA provided herein can be derived from a particular strain of Big Brushy Tank virus. In certain embodiments, the DNA or cDNA provided herein can be derived from a particular strain of Catarina virus. In certain embodiments, the DNA or cDNA provided herein can be derived from a particular strain of Skinner Tank virus. In certain embodiments, the DNA or cDNA provided herein can be derived from a particular strain of Tonto Creek virus. In certain embodiments, the DNA or cDNA provided herein can be derived from a particular strain of Xapuri virus.

[0416] In certain embodiments, the vector generated to encode an arenavirus particle as described herein may be based on a specific strain of LCMV. Strains of LCMV include Clone 13, MP strain, Arm CA 1371, Arm E-250, WE, UBC, Traub, Pasteur, 810885, CH-5692, Marseille #12, HP65-2009, 200501927, 810362, 811316, 810316, 810366, 20112714, Douglas, GR01, SN05, CABN and their derivatives. In certain embodiments, an arenavirus particle or a tri-segmented arenavirus particle as described herein may be based on LCMV Clone 13. In other embodiments, the vector generated to encode an arenavirus particle or a tri-segmented arenavirus particle as described herein may be based on LCMV MP strain.

[0417] In certain embodiments, the vector generated to encode an arenavirus particle as described herein may be based on a specific strain of Lassa virus. In certain embodiments, the vector generated to encode an arenavirus particle as described herein may be based on a specific strain of Pichinde virus. In certain embodiments, the vector generated to encode an arenavirus particle as described herein may be based on a specific strain of Junin virus. In certain embodiments, the vector generated to encode an arenavirus particle as described herein may be based on a specific strain of Oliveros virus. In certain embodiments, the vector generated to encode an arenavirus particle as described herein may be based on a specific strain of Tamiami virus. In certain embodiments, the vector generated to encode an arenavirus particle as described herein may be based on a specific strain of Mobala virus. In certain embodiments, the vector generated to encode an arenavirus particle as described herein may be based on a specific strain of Mopeia virus. In certain embodiments, the vector generated to encode an arenavirus particle as described herein may be based on a specific strain of Ippy virus. In certain embodiments, the vector generated to encode an arenavirus particle as described herein may be based on a specific strain of Amapari virus. In certain embodiments, the vector generated to encode an arenavirus particle as described herein may be based on a specific strain of Flexal virus. In certain embodiments, the vector generated to encode an arenavirus particle as described herein may be based on a specific strain of Guanarito virus. In certain embodiments, the vector generated to encode an arenavirus particle as described herein may be based on a specific strain of Latino virus. In certain embodiments, the vector generated to encode an arenavirus particle as described herein may be based on a specific strain of Machupo virus. In certain embodiments, the vector generated to encode an arenavirus particle as described herein may be based on a specific strain of Parana virus. In certain embodiments, the vector generated to encode an arenavirus particle as described herein may be based on a specific strain of Pirital virus. In certain embodiments, the vector generated to encode an arenavirus particle as described herein may be based on a specific strain of Sabia virus. In certain embodiments, the vector generated to encode an arenavirus particle as described herein may be based on a specific strain of Tacaribe virus. In certain embodiments, the vector generated to encode an arenavirus particle as described herein may be based on a specific strain of Bear Canyon virus. In certain embodiments, the vector generated to encode an arenavirus particle as described herein may be based on a specific strain of Whitewater Arroyo virus. In certain embodiments, the vector generated to encode an arenavirus particle as described herein may be based on a specific strain of Allpahuayo virus (ALLV). In certain embodiments, the vector generated to encode an arenavirus particle as described herein may be based on a specific strain of Alxa virus. In certain embodiments, the vector generated to encode an arenavirus particle as described herein may be based on a specific strain of Chapare virus. In certain embodiments, the vector generated to encode an arenavirus particle as described herein may be based on a specific strain of Lijiang virus. In certain embodiments, the vector generated to encode an arenavirus particle as described herein may be based on a specific strain of Cupixi virus. In certain embodiments, the vector generated to encode an arenavirus particle as described herein may be based on a specific strain of Gairo virus. In certain embodiments, the vector generated to encode an arenavirus particle as described herein may be based on a specific strain of Loei River virus. In certain embodiments, the vector generated to encode an arenavirus particle as described herein may be based on a specific strain of Lujo virus. In certain embodiments, the vector generated to encode an arenavirus particle as described herein may be based on a specific strain of Luna virus. In certain embodiments, the vector generated to encode an arenavirus particle as described herein may be based on a specific strain of Luli virus. In certain embodiments, the vector generated to encode an arenavirus particle as described herein may be based on a specific strain of Lunk virus. In certain embodiments, the vector generated to encode an arenavirus particle as described herein may be based on a specific strain of Mariental virus. In certain embodiments, the vector generated to encode an arenavirus particle as described herein may be based on a specific strain of Merino Walk virus. In certain embodiments, the vector generated to encode an arenavirus particle as described herein may be based on a specific strain of Morogoro virus. In certain embodiments, the vector generated to encode an arenavirus particle as described herein may be based on a specific strain of Okahandja virus. In certain embodiments, the vector generated to encode an arenavirus particle as described herein may be based on a specific strain of Apore virus. In certain embodiments, the vector generated to encode an arenavirus particle as described herein may be based on a specific strain of Ryukyu virus. In certain embodiments, the vector generated to encode an arenavirus particle as described herein may be based on a specific strain of Solwezi virus. In certain embodiments, the vector generated to encode an arenavirus particle as described herein may be based on a specific strain of souris virus. In certain embodiments, the vector generated to encode an arenavirus particle as described herein may be based on a specific strain of Wenzhou virus. In certain embodiments, the vector generated to encode an arenavirus particle as described herein may be based on a specific strain of Big Brushy Tank virus. In certain embodiments, the vector generated to encode an arenavirus particle as described herein may be based on a specific strain of Catarina virus. In certain embodiments, the vector generated to encode an arenavirus particle as described herein may be based on a specific strain of Skinner Tank virus. In certain embodiments, the vector generated to encode an arenavirus particle as described herein may be based on a specific strain of Tonto Creek virus. In certain embodiments, the vector generated to encode an arenavirus particle as described herein may be based on a specific strain of Xapuri virus,

[0418] In another embodiment, provided herein is a cell, wherein the cell comprises a DNA or a vector system described above in this section. Cell lines derived from such cells, cultures comprising such cells, methods of culturing such cells are also provided herein. In certain embodiments, provided herein is a cell, wherein the cell comprises a cDNA of the tri-segmented arenavirus particle. In some embodiments, the cell comprises the S segment(s) and/or the L segment(s).

### 5.10 Generation of the Arenavirus Particles

[0419] Generally, arenavirus particles can be recombinantly produced by standard reverse genetic techniques as described for LCMV (see Flatz et al., 2006, Proc Natl Acad Sci USA 103:4663-4668; Sanchez et al., 2006, Virology 350:370; Ortiz-Riano et al., 2013, J Gen Virol. 94:1175-88, which are incorporated by reference herein). To generate the arenavirus particles provided herein, these techniques can be applied as described below.

[0420] In certain embodiments, the genome of the viruses may comprise the nucleotide sequence described in Section 5.5. The genome of the viruses can be modified as described in Section 5.7. The generation of an arenavirus particle as described in Section 5.6 or an arenavirus particle comprising a genomic or antigenomic segment as described in Section 5.7 can be recombinantly produced by any reverse genetic techniques known to one skilled in the art.

[0421] In certain embodiments, an arenavirus particle as described in Section 5.6 or an arenavirus particle comprising a genomic or antigenomic segment as described in Section 5.7 can be tri-segmented. A tri-segmented arenavirus particle can be recombinantly produced by reverse genetic techniques known in the art, for example as described in International Publication No.: WO 2016/075250 A1.

### 5.10.1 Infectious and Replication Competent Arenavirus Particle

[0422] In certain embodiments, the method of generating a bi-segmented arenavirus particle comprises (i) transfecting into a host cell the cDNA or RNA sequences each transcribed in vitro from DNA sequences of a first and a second arenavirus genomic or antigenomic segments; (ii) transfecting into the host cell nucleotide sequences driving intracellular expression of arenaviral trans-acting factors; (iii) maintaining the host cell under conditions suitable for virus formation; and (iv) harvesting the arenavirus particle. In certain more specific embodiments, the cDNA is comprised in a plasmid.

[0423] In certain embodiments, when the arenavirus particle is tri-segmented, the method of generating the arenavirus particle comprises (i) transfecting into a host cell the cDNAs or RNA sequences each transcribed in vitro from DNA sequences of the one L segment and two S segments or two L segments and one S segment; (ii) transfecting into the host cell nucleotide sequences driving intracellular expression of arenaviral trans-acting factors; (iii) maintaining the host cell under conditions suitable for virus formation; and (iv) harvesting the arenavirus particle.

[0424] Once generated from cDNA, arenavirus particles (i.e., infectious and replication competent) can be propagated. In certain embodiments, the arenavirus particle can be propagated in any host cell that allows the virus to grow to titers that permit the uses of the virus as described herein. In one embodiment, the host cell allows the arenavirus particle to grow to titers comparable to those determined for the corresponding tri-segmented artLCMV particle expressing the same heterologous non-arenaviral polypeptide(s).

[0425] In certain embodiments, the arenavirus particle may be propagated in host cells. Specific examples of host cells that can be used include BHK-21, HEK 293, VERO or other. In a specific embodiment, the arenavirus particle may be propagated in a cell line.

[0426] In certain embodiments, the host cells are kept in culture and are transfected with one or more plasmid(s). The plasmid(s) express or encode the arenavirus genomic or antigenomic segment(s) to be generated under control of one or more expression cassettes suitable for expression in mammalian cells, e.g., consisting of a polymerase I promoter and terminator.

[0427] In specific embodiments, the host cells are kept in culture and are transfected with one or more plasmid(s). The plasmid(s) express or encode the viral gene(s) to be generated under control of one or more expression cassettes suitable for expression in mammalian cells, e.g., consisting of a polymerase I promoter and terminator.

[0428] Plasmids that can be used for the generation of the arenavirus particle can include: i) a plasmid encoding the S genomic segment e.g., pol-I S, ii) a plasmid encoding the L genomic segment e.g., pol-I L. In certain embodiments, the plasmid encoding an arenavirus polymerase that directs intracellular synthesis of the viral L and S segments can be incorporated into the transfection mixture. For example, a plasmid encoding the L protein and/or a plasmid encoding NP (pC-L and pC-NP, respectively) can be present. The L protein and NP are the minimal trans-acting factors necessary for viral RNA transcription and replication. Alternatively, intracellular synthesis of viral L and S segments, together with NP and L protein can be performed using an expression cassette with pol-I and pol-II promoters reading from opposite sides into the L and S segment cDNAs of two separate plasmids, respectively.

[0429] In certain embodiments, when the arenaviral particle is tri-segmented, plasmids that can be used for generating the tri-segmented arenavirus comprising one L segment and two S segments can include: i) two plasmids each encoding the S genome segment e.g., pol-I S, ii) a plasmid encoding the L genome segment e.g., pol-I L. Plasmids needed for the tri-segmented arenavirus comprising two L segments and one S segment are: i) two plasmids each encoding the L genome segment e.g., pol-L, ii) a plasmid encoding the S genome segment e.g., pol-I S.

[0430] In certain embodiments, when the arenaviral particle is tri-segmented, plasmids encoding an arenavirus polymerase that direct intracellular synthesis of the viral L and S segments can be incorporated into the transfection mixture. For example, a plasmid encoding the L protein and a plasmid encoding NP (pC-L and pC-NP, respectively). The L protein and NP are the minimal trans-acting factors necessary for viral RNA transcription and replication. Alternatively, intracellular synthesis of viral L and S segments, together with NP and L protein can be performed using an expression cassette with pol-I and pol-II promoters reading from opposite sides into the L and S segment cDNAs of two separate plasmids, respectively.

[0431] In certain embodiments, the arenavirus genomic or antigenomic segments are under the control of a promoter. Typically, RNA polymerase I-driven expression cassettes, RNA polymerase II-driven cassettes or T7 bacteriophage RNA polymerase driven cassettes can be used. In certain embodiments, the plasmid(s) encoding the arenavirus genomic or antigenomic segments can be the same, i.e., the genome sequence and trans-acting factors can be transcribed by a promoter from one plasmid. Specific examples of promoters include an RNA polymerase I promoter, an RNA polymerase II promoter, an RNA polymerase III promoter, a T7 promoter, an SP6 promoter or a T3 promoter.

[0432] In addition, the plasmid(s) can feature a mammalian selection marker, e.g., puromycin resistance, under control of an expression cassette suitable for gene expression in mammalian cells, e.g., polymerase II expression cassette as above, or the viral gene transcript(s) are followed by an internal ribosome entry site, such as the one of encephalomyocarditis virus, followed by the mammalian resistance marker. For production in E. coli, the plasmid additionally features a bacterial selection marker, such as an ampicillin resistance cassette.

[0433] To obtain a cell line stably expressing a desired protein, for example an arenaviral structural protein, transfection of a host cell with a plasmid(s) can be performed using any of the commonly used strategies such as calcium-phosphate, liposome-based protocols or electroporation. A few days later the suitable selection agent, e.g., puromycin, is added in titrated concentrations. Surviving clones are isolated and subcloned following standard procedures, and high-expressing clones are identified using Western blot or flow cytometry procedures with antibodies directed against the viral protein(s) of interest.

[0434] For recovering the arenavirus particle described herein, the following procedures are envisaged. First day: cells, typically 80% confluent in M6-well plates, are transfected with a mixture of the plasmids, as described above. For this one can exploit any commonly used strategies such as calcium-phosphate, liposome-based protocols or electroporation.

[0435] 3-5 days later: The cultured supernatant (arenavirus vector preparation) is harvested, aliquoted and stored at 4° C., −20° C., or −80° C., depending on how long the arenavirus vector should be stored prior use. The arenavirus vector preparation's infectious titer is assessed by an immunofocus assay. Alternatively, the transfected cells and supernatant may be passaged to a larger vessel (e.g., a T75 tissue culture flask) on day 3-5 after transfection, and culture supernatant is harvested up to five days after passage.

[0436] The present application furthermore relates to expression of a heterologous non-arenaviral polypeptide, wherein a plasmid encoding the genomic segment is modified to incorporate a nucleotide encoding a heterologous non-arenaviral polypeptide. The nucleotide encoding a heterologous non-arenaviral polypeptide can be incorporated into the plasmid using restriction enzymes and ligases by molecular cloning techniques as known to those skilled in the art.

### 5.10.2 Infectious, Replication-Defective Arenavirus Particle

[0437] Infectious, replication-defective arenavirus particles can be rescued as described above. However, once generated from DNA, the infectious, replication-deficient arenaviruses provided herein can be propagated in complementing cells. Complementing cells are cells that provide the functionality that has been eliminated from the replication-deficient arenavirus by modification of its genome (e.g., if the ORF encoding the GP protein is deleted or functionally inactivated, a complementing cell does provide the GP protein).

[0438] Owing to the removal or functional inactivation of one or more of the ORFs in arenavirus vectors (here deletion of the glycoprotein, GP, will be taken as an example), arenavirus vectors can be generated and expanded in cells providing in trans the deleted viral gene(s), e.g., the GP in the present example. Such a complementing cell line, henceforth referred to as C-cells, is generated by transfecting a cell line such as BHK-21, HEK 293, VERO or other with one or more plasmid(s) for expression of the viral gene(s) of interest (complementation plasmid, referred to as C-plasmid). The C-plasmid(s) express or encode the viral gene(s) deleted in the arenavirus vector to be generated under control of one or more expression cassettes suitable for expression in mammalian cells, e.g., a mammalian polymerase II promoter such as the EF1alpha promoter with a polyadenylation signal. In addition, the complementation plasmid features a mammalian selection marker, e.g., puromycin resistance, under control of an expression cassette suitable for gene expression in mammalian cells, e.g., polymerase II expression cassette as above, or the viral gene transcript(s) are followed by an internal ribosome entry site, such as the one of encephalomyocarditis virus, followed by the mammalian resistance marker. For production in E. coli, the plasmid additionally features a bacterial selection marker, such as an ampicillin resistance cassette.

[0439] Cells that can be used, e.g., BHK-21, HEK 293, MC57G or other, are kept in culture and are transfected with the complementation plasmid(s) using any of the commonly used strategies such as calcium-phosphate, liposome-based protocols or electroporation. A few days later the suitable selection agent, e.g., puromycin, is added in titrated concentrations. Surviving clones are isolated and subcloned following standard procedures, and high-expressing C-cell clones are identified using Western blot or flow cytometry procedures with antibodies directed against the viral protein(s) of interest. As an alternative to the use of stably transfected C-cells transient transfection of normal cells can complement the missing viral gene(s) in each of the steps where C-cells will be used below. In addition, a helper virus can be used to provide the missing functionality in trans.

[0440] Plasmids can be of two types: i) two plasmids, referred to as TF-plasmids for expressing intracellularly in C-cells the minimal trans-acting factors of the arenavirus, is derived from e.g., NP and L proteins of LCMV in the present example; and ii) plasmids, referred to as GS-plasmids, for expressing intracellularly in C-cells the arenavirus vector genome segments, e.g., the segments with designed modifications. TF-plasmids express the NP and L proteins of the respective arenavirus vector under control of an expression cassette suitable for protein expression in mammalian cells, typically e.g., a mammalian polymerase II promoter such as the CMV or EF1alpha promoter, either one of them preferentially in combination with a polyadenylation signal. GS-plasmids express the small (S) and the large (L) genome segments of the vector. Typically, polymerase I-driven expression cassettes or T7 bacteriophage RNA polymerase (T7-) driven expression cassettes can be used, the latter preferentially with a 3′-terminal ribozyme for processing of the primary transcript to yield the correct end. In the case of using a T7-based system, expression of T7 in C-cells must be provided by either including in the recovery process an additional expression plasmid, constructed analogously to TF-plasmids, providing T7, or C-cells are constructed to additionally express T7 in a stable manner. In certain embodiments, TF and GS plasmids can be the same, i.e., the genome sequence and trans-acting factors can be transcribed by T7, polI and polII promoters from one plasmid.

[0441] For recovering of the arenavirus vector, the following procedures can be used. First day: C-cells, typically 80% confluent in M6-well plates, are transfected with a mixture of the two TF-plasmids plus the two GS-plasmids. In certain embodiments, the TF and GS plasmids can be the same, i.e., the genome sequence and trans-acting factors can be transcribed by T7, polI and polII promoters from one plasmid. For this one can exploit any of the commonly used strategies such as calcium-phosphate, liposome-based protocols or electroporation.

[0442] 3-5 days later: The culture supernatant (arenavirus vector preparation) is harvested, aliquoted and stored at 4° C., −20° C. or −80° C. depending on how long the arenavirus vector should be stored prior to use. Then the arenavirus vector preparation's infectious titer is assessed by an immunofocus assay on C-cells. Alternatively, the transfected cells and supernatant may be passaged to a larger vessel (e.g., a T75 tissue culture flask) on day 3-5 after transfection, and culture supernatant is harvested up to five days after passage.

[0443] The invention furthermore relates to expression of an antigen in a cell culture wherein the cell culture is infected with an infectious, replication-deficient arenavirus expressing an antigen. When used for expression of an antigen in cultured cells, the following two procedures can be used:
[0444] i) The cell type of interest is infected with the arenavirus vector preparation described herein at a multiplicity of infection (MOI) of one or more, e.g., two, three or four, resulting in production of the antigen in all cells already shortly after infection.
[0445] ii) Alternatively, a lower MOI can be used and individual cell clones can be selected for their level of virally driven antigen expression. Subsequently individual clones can be expanded infinitely owing to the non-cytolytic nature of arenavirus vectors. Irrespective of the approach, the antigen can subsequently be collected (and purified) either from the culture supernatant or from the cells themselves, depending on the properties of the antigen produced. However, the invention is not limited to these two strategies, and other ways of driving expression of antigen using infectious, replication-deficient arenaviruses as vectors may be considered.

### 5.11 Methods of Using the Compositions Provided Herein—Generation and Rescue of Arenavirus Particles

[0446] In certain embodiments, the nucleotide sequence as provided herein (see Section 5.5) can be used to generate and/or rescue arenavirus particles. In certain embodiments, the arenavirus particles as provided herein (see Section 5.6) can be used to generate and/or rescue arenavirus particles. In certain embodiments, the arenavirus genomic or antigenomic segment as provided herein (see Section 5.7) can be used to generate and/or rescue arenavirus particles.

[0447] Generally, arenavirus particles can be recombinantly produced by standard reverse genetic techniques as described for LCMV (see Flatz et al., 2006, Proc Natl Acad Sci USA 103:4663-4668; Sanchez et al., 2006, Virology 350:370; Ortiz-Riano et al., 2013, J Gen Virol. 94:1175-88, which are incorporated by reference herein).

[0448] In certain embodiments, an arenavirus particle generated or rescued can be bi-segmented. In other embodiments, an arenavirus particle generated or rescued can be tri-segmented. A tri-segmented arenavirus particle can be recombinantly produced by reverse genetic techniques known in the art, for example as described in International Publication No.: WO 2016/075250 A1.

### 5.11.1 Infectious and Replication Competent Arenavirus Particle

[0449] In certain embodiments, the method of generating a bi-segmented arenavirus particle comprises (i) transfecting into a host cell one or more DNA sequences as described in Section 5.5, or one or more RNA sequences as described in Section 5.5, or one or more RNA sequences each transcribed in vitro from the DNA sequence as described in Section 5.5; (ii) transfecting into the host cell nucleotide sequences driving intracellular expression of arenaviral trans-acting factors; (iii) maintaining the host cell under conditions suitable for virus formation; and (iv) harvesting the arenavirus particle. In certain more specific embodiments, the DNA is comprised in a plasmid.

[0450] In certain embodiments, when the arenavirus particle is tri-segmented, the method of generating the arenavirus particle comprises (i) transfecting into a host cell one or more DNA sequences as described in Section 5.5, one or more RNA sequences as described in Section 5.5, or one or more RNA sequences each transcribed in vitro from the DNA sequence as described in Section 5.5, wherein the above nucleotide sequences encode the one L segment and two S segments or two L segments and one S segment; (ii) transfecting into the host cell nucleotide sequences driving intracellular expression of arenaviral trans-acting factors; (iii) maintaining the host cell under conditions suitable for virus formation; and (iv) harvesting the arenavirus particle. In certain more specific embodiments, the DNA is comprised in a plasmid.

[0451] In certain embodiments, the method of generating a bi-segmented arenavirus particle comprises (i) transfecting into a host cell one or more cDNA sequences of the mRNA transcripts of the genome of the arenavirus particle as described in Section 5.6 or one or more RNA sequences each transcribed in vitro from the cDNA of the mRNA transcript of the genome of the arenavirus particle as described in Section 5.6; (ii) transfecting into the host cell nucleotide sequences driving intracellular expression of arenaviral trans-acting factors; (iii) maintaining the host cell under conditions suitable for virus formation; and (iv) harvesting the arenavirus particle. In certain more specific embodiments, the DNA is comprised in a plasmid.

[0452] In certain embodiments, when the arenavirus particle is tri-segmented, the method of generating the arenavirus particle comprises (i) transfecting into a host cell one or more cDNA sequences of the mRNA transcripts of the genome of the arenavirus particle as described in Section 5.6 or one or more RNA sequences each transcribed in vitro from the cDNA of the mRNA transcript of the genome of the arenavirus particle as described in Section 5.6, wherein the above nucleotide sequences encode the one L segment and two S segments or two L segments and one S segment; (ii) transfecting into the host cell nucleotide sequences driving intracellular expression of arenaviral trans-acting factors; (iii) maintaining the host cell under conditions suitable for virus formation; and (iv) harvesting the arenavirus particle. In certain more specific embodiments, the DNA is comprised in a plasmid.

[0453] In certain embodiments, the method of generating a bi-segmented arenavirus particle comprises (i) transfecting into a host cell the cDNA sequences of the arenavirus genomic or antigenomic segment as described in Section 5.7 or one or more RNA sequences each transcribed in vitro from the cDNA sequence of the arenavirus genomic or antigenomic segment as described in Section 5.7; (ii) transfecting into the host cell nucleotide sequences driving intracellular expression of arenaviral trans-acting factors; (iii) maintaining the host cell under conditions suitable for virus formation; and (iv) harvesting the arenavirus particle. In certain more specific embodiments, the DNA is comprised in a plasmid.

[0454] In certain embodiments, when the arenavirus particle is tri-segmented, the method of generating the arenavirus particle comprises (i) transfecting into a host cell the cDNA sequences of the arenavirus genomic or antigenomic segment as described in Section 5.7 or one or more RNA sequences each transcribed in vitro from the cDNA sequence of the arenavirus genomic or antigenomic segment as described in Section 5.7, wherein the above nucleotide sequences encode the one L segment and two S segments or two L segments and one S segment; (ii) transfecting into the host cell nucleotide sequences driving intracellular expression of arenaviral trans-acting factors; (iii) maintaining the host cell under conditions suitable for virus formation; and (iv) harvesting the arenavirus particle. In certain more specific embodiments, the DNA is comprised in a plasmid.

[0455] More details on generation of infectious and replication competent arenavirus particles are described in Section 5.10.1.

### 5.11.2 Infectious, Replication-Defective Arenavirus Particle

[0456] Infectious, replication-defective arenavirus particles can be rescued as described above. More details on generation of infectious, replication-defective arenavirus particles are described in Section 5.10.2.

### 5.12 Methods of Using the Compositions Provided Herein—Vaccine

[0457] The present application furthermore relates to vaccines, immunogenic compositions (e.g., vaccine formulations), and pharmaceutical compositions comprising a nucleotide sequence as described in Section 5.5 and related expression products, arenavirus particles and arenavirus genomic or antigenomic segments. The present application also relates to vaccines, immunogenic compositions (e.g., vaccine formulations), and pharmaceutical compositions comprising an arenavirus particle as described in Section 5.6. The present application further relates to vaccines, immunogenic compositions (e.g., vaccine formulations), and pharmaceutical compositions comprising an arenavirus genomic or antigenomic segment as described in Section 5.7 and related arenavirus particles. The present application further relates to vaccines, immunogenic compositions (e.g., vaccine formulations), and pharmaceutical compositions comprising a translation product as described in Section 5.8. The present application further relates to vaccines, immunogenic compositions (e.g., vaccine formulations), and pharmaceutical compositions comprising a cDNA, DNA sequence and/or DNA expression vector related to the nucleotide sequences as described in Section 5.5, the arenavirus particle as described in Section 5.6, and/or the arenavirus genomic or antigenomic segments as described in Section 5.7, for example a DNA sequence encoding the arenavirus genomic or antigenomic segment as described in Section 5.7. Such vaccines, immunogenic compositions and pharmaceutical compositions can be formulated according to standard procedures in the art.

[0458] It will be readily apparent to one of ordinary skill in the relevant arts that suitable modifications and adaptations to the methods and applications described herein can be obvious and can be made without departing from the scope or any embodiment thereof.

[0459] In certain embodiments, provided herein are compositions comprising the nucleotide sequences as described in Section 5.5. In another embodiment, provided herein are compositions comprising the arenavirus particle as described in Section 5.6. In another embodiment, provided herein are compositions comprising the arenavirus genomic or antigenomic segments as described in Section 5.7. In another embodiment, provided herein are compositions comprising the translation product as described in Section 5.8. In another embodiment, provided herein are compositions comprising a cDNA, DNA sequence and/or DNA expression vectors related to the nucleotide sequences as described in Section 5.5, the arenavirus particle as described in Section 5.6, and/or the arenavirus genomic or antigenomic segments as described in Section 5.7, for example a DNA sequence encoding the arenavirus genomic or antigenomic segment as described in Section 5.7. Such compositions can be used in methods of treatment and prevention of disease. In a specific embodiment, the compositions described herein are used in the treatment of subjects infected with, or susceptible to, an infection. In other embodiments, the compositions described herein are used in the treatment of subjects susceptible to or exhibiting symptoms characteristic of cancer or tumorigenesis or are diagnosed with cancer. In another specific embodiment, the immunogenic compositions provided herein can be used to induce an immune response in a host to whom the composition is administered. The immunogenic compositions described herein can be used as vaccines and can accordingly be formulated as pharmaceutical compositions. In a specific embodiment, the immunogenic compositions described herein are used in the prevention or treatment of infection or cancer of subjects (e.g., human subjects). In other embodiments, the vaccine, immunogenic composition or pharmaceutical composition are suitable for veterinary and/or human administration.

[0460] In certain embodiments, provided herein are immunogenic compositions comprising an arenavirus vector as described herein. In some embodiments, a subject is immunized or treated with one or more arenavirus vector of the disclosure. In some embodiments, a subject is primed with one arenavirus of the disclosure (e.g., LCMV, Lassa virus, PICV, Junin virus, Oliveros virus, Tamiami virus, Mobala virus, Mopeia virus, Ippy virus, Amapari virus, Flexal virus, Guanarito virus, Latino virus, Machupo virus, Parana virus, Pirital virus, Sabia virus, Tacaribe virus, Bear Canyon virus, Whitewater Arroyo virus, Allpahuayo virus, Alxa virus, Chapare virus, Lijiang virus, Cupixi virus, Gairo virus, Loei River virus, Lujo virus, Luna virus, a Luli virus, Lunk virus, Mariental virus, Merino Walk virus, Morogoro virus, Okahandja virus, Apore virus, Ryukyu virus, Solwezi virus, souris virus, Wenzhou virus, Big Brushy Tank virus, Catarina virus, Skinner Tank virus, Tonto Creek virus, and/or Xapuri virus derived arenavirus) and boosted with a different arenavirus of the disclosure (e.g., LCMV, Lassa virus, PICV, Junin virus, Oliveros virus, Tamiami virus, Mobala virus, Mopeia virus, Ippy virus, Amapari virus, Flexal virus, Guanarito virus, Latino virus, Machupo virus, Parana virus, Pirital virus, Sabia virus, Tacaribe virus, Bear Canyon virus, Whitewater Arroyo virus, Allpahuayo virus, Alxa virus, Chapare virus, Lijiang virus, Cupixi virus, Gairo virus, Loei River virus, Lujo virus, Luna virus, a Luli virus, Lunk virus, Mariental virus, Merino Walk virus, Morogoro virus, Okahandja virus, Apore virus, Ryukyu virus, Solwezi virus, souris virus, Wenzhou virus, Big Brushy Tank virus, Catarina virus, Skinner Tank virus, Tonto Creek virus, and/or Xapuri virus derived arenavirus). In some embodiments, a subject is primed with a first arenavirus of the disclosure (e.g., PICV, LCMV, TAMV, TCRV, or any arenavirus species of the disclosure) and boosted with a second arenavirus of the disclosure (e.g., PICV, LCMV, TAMV, TCRV, or any arenavirus species of the disclosure). In some embodiments, a subject is immunized twice with arenavirus vector(s) of the disclosure (e.g., split based vectors). In some embodiments, a subject is immunized twice with the same arenavirus vector(s) of the disclosure (e.g., split based vectors or “art” based vectors of the disclosure). In some embodiments, a subject is immunized twice with different arenavirus vectors of the disclosure (e.g., split based vectors of the disclosure (e.g., a split based vector comprising a buffer peptide and/or a split based vector that does not comprise a buffer peptide, and/or an “art” based vector of the disclosure). In some embodiments, a subject is immunized twice with different arenavirus vectors of the disclosure (e.g., two or more different split based vectors comprising a buffer peptide). In some embodiments, a subject is immunized twice with different arenavirus vectors of the disclosure (e.g., a split based vector comprising a buffer peptide and a split based vector that does not comprise a buffer peptide). In some embodiments, a subject is immunized twice with different arenavirus vectors of the disclosure (e.g., a split based vector comprising a buffer peptide and an “art” based vector of the disclosure). In some embodiments, a subject is immunized twice with different arenavirus vectors of the disclosure (e.g., a split based vector that does not comprise a buffer peptide and an “art” based vector of the disclosure). In some embodiments, disclosed herein is a method of immunizing a subject suspected of having, diagnosed with, or at risk of developing a disease or disorder (e.g., an infection and/or a cancer). In some embodiments, the method comprises administering a first engineered arenavirus particle to the subject; and administering a second engineered arenavirus particle to the subject. In some embodiments, the first engineered arenavirus particle is derived from a first arenavirus species or clade. In some embodiments, the second engineered arenavirus particle is derived from a second arenavirus species or clade. In some embodiments, the first and the second arenavirus species or clade are the same (e.g., PICV, LCMV, TAMV, TCRV, or any arenavirus species of the disclosure). In some embodiments, the first and the second arenavirus particles are derived from different arenavirus species or clades (e.g., from PICV, LCMV, TAMV, TCRV, or any combination of arenavirus species of the disclosure). In some embodiments, the first engineered arenavirus particle and the second engineered arenavirus particle are the same. In some embodiments, the first engineered arenavirus particle and the second engineered arenavirus particle are different. In some embodiments, the first engineered arenavirus particle is derived from a first arenavirus species. In some embodiments, the second engineered arenavirus particle is derived from a second arenavirus species. In some embodiments, the first arenavirus species is LCMV and the second arenavirus species is PICV. In some embodiments, the first arenavirus species is PICV and the second arenavirus species is LCMV. In some embodiments, the first arenavirus species is LCMV and the second arenavirus species is TAMV. In some embodiments, the first arenavirus species is TAMV and the second arenavirus species is LCMV. In some embodiments, the first arenavirus species is LCMV and the second arenavirus species is TCRV. In some embodiments, the first arenavirus species is TCRV and the second arenavirus species is LCMV. In some embodiments, the first arenavirus species is TAMV and the second arenavirus species is PICV. In some embodiments, the first arenavirus species is PICV and the second arenavirus species is TAMV. In some embodiments, the first arenavirus species is TCRV and the second arenavirus species is PICV. In some embodiments, the first arenavirus species is PICV and the second arenavirus species is TCRV. In some embodiments, the first arenavirus species is TCRV and the second arenavirus species is TAMV. In some embodiments, the first arenavirus species is TAMV and the second arenavirus species is TCRV. In some embodiments, the first arenavirus species is any arenavirus species of the disclosure (e.g., LCMV, Lassa virus, PICV, Junin virus, Oliveros virus, Tamiami virus, Mobala virus, Mopeia virus, Ippy virus, Amapari virus, Flexal virus, Guanarito virus, Latino virus, Machupo virus, Parana virus, Pirital virus, Sabia virus, Tacaribe virus, Bear Canyon virus, Whitewater Arroyo virus, Allpahuayo virus, Alxa virus, Chapare virus, Lijiang virus, Cupixi virus, Gairo virus, Loei River virus, Lujo virus, Luna virus, a Luli virus, Lunk virus, Mariental virus, Merino Walk virus, Morogoro virus, Okahandja virus, Apore virus, Ryukyu virus, Solwezi virus, souris virus, Wenzhou virus, Big Brushy Tank virus, Catarina virus, Skinner Tank virus, Tonto Creek virus, and/or Xapuri virus). In some embodiments, the second arenavirus species is any arenavirus species of the disclosure (e.g., LCMV, Lassa virus, PICV, Junin virus, Oliveros virus, Tamiami virus, Mobala virus, Mopeia virus, Ippy virus, Amapari virus, Flexal virus, Guanarito virus, Latino virus, Machupo virus, Parana virus, Pirital virus, Sabia virus, Tacaribe virus, Bear Canyon virus, Whitewater Arroyo virus, Allpahuayo virus, Alxa virus, Chapare virus, Lijiang virus, Cupixi virus, Gairo virus, Loei River virus, Lujo virus, Luna virus, a Luli virus, Lunk virus, Mariental virus, Merino Walk virus, Morogoro virus, Okahandja virus, Apore virus, Ryukyu virus, Solwezi virus, souris virus, Wenzhou virus, Big Brushy Tank virus, Catarina virus, Skinner Tank virus, Tonto Creek virus, and/or Xapuri virus). In some embodiments, the third and/or any subsequent arenavirus species is any arenavirus species of the disclosure (e.g., LCMV, Lassa virus, PICV, Junin virus, Oliveros virus, Tamiami virus, Mobala virus, Mopeia virus, Ippy virus, Amapari virus, Flexal virus, Guanarito virus, Latino virus, Machupo virus, Parana virus, Pirital virus, Sabia virus, Tacaribe virus, Bear Canyon virus, Whitewater Arroyo virus, Allpahuayo virus, Alxa virus, Chapare virus, Lijiang virus, Cupixi virus, Gairo virus, Loei River virus, Lujo virus, Luna virus, a Luli virus, Lunk virus, Mariental virus, Merino Walk virus, Morogoro virus, Okahandja virus, Apore virus, Ryukyu virus, Solwezi virus, souris virus, Wenzhou virus, Big Brushy Tank virus, Catarina virus, Skinner Tank virus, Tonto Creek virus, and/or Xapuri virus). In some embodiments, a composition is administered to the patient as a single dose followed by a second dose three to six weeks later. In some embodiments, a booster inoculation may be administered to the subject at six to twelve months intervals following a second inoculation. In some embodiments, a booster inoculation may utilize a different arenavirus or composition thereof. In some embodiments, the administration of a composition may be repeated and separated by at least 1 day, 2 days, 3 days, 4 days, 5 days, 10 days, 15 days, 30 days, 45 days, 2 months, 75 days, 3 months, or at least 6 months. In some embodiments, the first engineered arenavirus particle of the disclosure is administered prior to the second, or the third, or any subsequent engineered arenavirus particle (e.g., prior to by about, at least by about, or at most by about: 30 minutes, 1 hr, 2 hrs, 3 hrs, 6 hrs, 10 hrs, 12 hrs, 16 hrs, 20 hrs, 24 hrs, 1 day, 2 days, 3 days, 4 days, 5 days, 6 days, 7 days, 1 week, 1.5 weeks, 2 weeks, 2.5 weeks, 3 weeks, 3.5 weeks, 4 weeks, 4.5 weeks, 5 weeks, 5.5 weeks, 6 weeks, 6.5 weeks, 7 weeks, 7.5 weeks, 8 weeks, 8.5 weeks, 9 weeks, 9.5 weeks, 10 weeks, 10.5 weeks, 11 weeks, 11.5 weeks, 12 weeks, 12.5 weeks, 13 weeks, 13.5 weeks, 14 weeks, 14.5 weeks, 15 weeks, 15.5 weeks, 16 weeks, 16.5 weeks, 17 weeks, 17.5 weeks, 18 weeks, 18.5 weeks, 19 weeks, 19.5 weeks, 20.5 weeks, 21 weeks, 21.5 weeks, 22 weeks, 22.5 weeks, 23 weeks, 23.5 weeks, 24 weeks, 24.5 weeks, 25 weeks, 25.5 weeks, 26 weeks, 26.5 weeks, 27 weeks, 27.5 weeks, 28 weeks, 28.5 weeks, 29 weeks, 29.5 weeks, 30 weeks 31.5 weeks, 32 weeks, or more than 32 weeks, 1 month, 3 months, 6 months, 9 months, 12 months, 15 months, 18 months, 20 months, 24 months, or more than 24 months). In some embodiments, the first engineered arenavirus particle of the disclosure is administered on the same day as the second engineered arenavirus particle. In some embodiments, the first engineered arenavirus particle of the disclosure is administered after the second, or the third, or any subsequent engineered arenavirus particle (e.g., after by about, at least by about, or at most by about: 30 minutes, 1 hr, 2 hrs, 3 hrs, 6 hrs, 10 hrs, 12 hrs, 16 hrs, 20 hrs, 24 hrs, 1 day, 2 days, 3 days, 4 days, 5 days, 6 days, 7 days, 1 week, 1.5 weeks, 2 weeks, 2.5 weeks, 3 weeks, 3.5 weeks, 4 weeks, 4.5 weeks, 5 weeks, 5.5 weeks, 6 weeks, 6.5 weeks, 7 weeks, 7.5 weeks, 8 weeks, 8.5 weeks, 9 weeks, 9.5 weeks, 10 weeks, 10.5 weeks, 11 weeks, 11.5 weeks, 12 weeks, 12.5 weeks, 13 weeks, 13.5 weeks, 14 weeks, 14.5 weeks, 15 weeks, 15.5 weeks, 16 weeks, 16.5 weeks, 17 weeks, 17.5 weeks, 18 weeks, 18.5 weeks, 19 weeks, 19.5 weeks, 20.5 weeks, 21 weeks, 21.5 weeks, 22 weeks, 22.5 weeks, 23 weeks, 23.5 weeks, 24 weeks, 24.5 weeks, 25 weeks, 25.5 weeks, 26 weeks, 26.5 weeks, 27 weeks, 27.5 weeks, 28 weeks, 28.5 weeks, 29 weeks, 29.5 weeks, 30 weeks 31.5 weeks, 32 weeks, or more than 32 weeks, 1 month, 3 months, 6 months, 9 months, 12 months, 15 months, 18 months, 20 months, 24 months, or more than 24 months). In some embodiments, the method further comprises administering a third engineered arenavirus particle of the disclosure. In some embodiments, the third engineered arenavirus particle of the disclosure is derived from the same arenavirus species or serotypes as the first and/or as the second engineered arenavirus particle. In some embodiments, the third engineered arenavirus particle of the disclosure is derived from a different arenavirus species or serotypes as the first and/or as the second engineered arenavirus particle. In some embodiments, the method further comprises administering several engineered arenavirus particle of the disclosure (e.g., one additional, two, three, four, five, six, seven, or more than seven engineered arenavirus particle of the disclosure). In some embodiments, the several engineered arenavirus particle of the disclosure are derived from the same arenavirus species or clades. In some embodiments, the several engineered arenavirus particle of the disclosure are derived from different arenavirus species or clades. In some embodiments, some of the several engineered arenavirus particle of the disclosure are derived from different arenavirus species or clades and some from the same arenavirus species or clades.

[0461] In some embodiments, an engineered arenavirus particle of the disclosure or an arenavirus vector of the disclosure is disclosed in Section 5.6. In some embodiments, the genome of an engineered arenavirus particle of the disclosure (e.g., first, second, third, and/or subsequent engineered arenavirus particle of the disclosure) consists of or comprises: a) an S segment that encodes arenavirus GP signal peptide and a heterologous non-arenaviral polypeptide or arenavirus GP signal peptide alone under the control of an arenavirus 3′ UTR and a heterologous non-arenaviral signal peptide, arenavirus GP1 and arenavirus GP2 under the control of an arenavirus 5′ UTR; b) an S segment that encodes NP under the control of an arenavirus 3′ UTR and another heterologous non-arenaviral polypeptide or no polypeptide under the control of an arenavirus 5′ UTR; and c) an L segment that encodes L protein under the control of an arenavirus 3′ UTR and Z protein under the control of an arenavirus 5′ UTR. In some embodiments, the genome of an engineered arenavirus particle of the disclosure (e.g., first, second, third, or several of the engineered arenavirus particle of the disclosure) consists of or comprises: a) an S segment that encodes arenavirus GP signal peptide and a heterologous non-arenaviral polypeptide or arenavirus GP signal peptide alone under the control of an arenavirus 3′ UTR and another heterologous non-arenaviral polypeptide or no polypeptide under the control of an arenavirus 5′ UTR; b) an S segment that encodes NP under the control of an arenavirus 3′ UTR and a heterologous non-arenaviral signal peptide, arenavirus GP1 and arenavirus GP2 under the control of an arenavirus 5′ UTR; and c) an L segment that encodes L protein under the control of an arenavirus 3′ UTR and Z protein under the control of an arenavirus 5′ UTR. In some embodiments, the two heterologous non-arenaviral polypeptides are the same or different from each other. In some embodiments, an arenavirus, an engineered arenavirus particle, or arenavirus vector of the disclosure is an arenavirus, arenavirus particle, or vector disclosed in WO2021/089853, the content of which is incorporated herein in its entirety.

[0462] In some embodiments, the genome of an engineered arenavirus particle of the disclosure is referred to herein as “art” (e.g., “artLCMV” or “artPICV”). In some embodiments, the genome of an engineered arenavirus particle of the disclosure (referred to herein as “art”) (e.g., first, second, third, and/or subsequent engineered arenavirus particle of the disclosure) consists of or comprises: (i) an S segment, wherein the ORF encoding the nucleoprotein is under control of an arenavirus 5′ untranslated region; (ii) an S segment, wherein the ORF encoding the matrix protein Z (“Z protein”) is under control of an arenavirus 5′ UTR; (iii) an S segment, wherein the ORF encoding the RNA dependent RNA polymerase L (“L protein”) is under control of an arenavirus 5′ UTR; (iv) an S segment, wherein the ORF encoding the viral glycoprotein is under control of an arenavirus 3′ UTR; (v) an S segment, wherein the ORF encoding the L protein is under control of an arenavirus 3′ UTR; (vi) an S segment, wherein the ORF encoding the Z protein is under control of an arenavirus 3′ UTR; (vii) an L segment, wherein the ORF encoding the GP is under control of an arenavirus 5′ UTR; (viii) an L segment, wherein the ORF encoding the NP is under control of an arenavirus 5′ UTR; (ix) an L segment, wherein the ORF encoding the L protein is under control of an arenavirus 5′ UTR; (x) an L segment, wherein the ORF encoding the GP is under control of an arenavirus 3′ UTR; (xi) an L segment, wherein the ORF encoding the NP is under control of an arenavirus 3′ UTR; (xii) an L segment, wherein the ORF encoding the Z protein is under control of an arenavirus 3′ UTR. In some embodiments, an arenavirus, an engineered arenavirus particle, or arenavirus vector of the disclosure is an arenavirus, arenavirus particle, or vector disclosed in WO2016/075250, the content of which is incorporated herein in its entirety.

[0463] In certain embodiments, such an immunogenic composition further comprises a pharmaceutically acceptable excipient. In certain embodiments, such an immunogenic composition further comprises an adjuvant. The adjuvant for administration in combination with a composition described herein may be administered before, concomitantly with, or after administration of said composition. In some embodiments, the term “adjuvant” refers to a compound that when administered in conjunction with or as part of a composition described herein augments, enhances and/or boosts the immune response to an arenavirus particle or tri-segmented arenavirus particle and, most importantly, the gene products it vectorises, but when the compound is administered alone does not generate an immune response to the arenavirus particle or tri-segmented arenavirus particle and the gene products vectorised by the latter. In some embodiments, the adjuvant generates an immune response to the arenavirus particle or tri-segmented arenavirus particle and the gene products vectorised by the latter and does not produce an allergy or other adverse reaction. Adjuvants can enhance an immune response by several mechanisms including, e.g., lymphocyte recruitment, stimulation of B and/or T cells, and stimulation of macrophages or dendritic cells. When a vaccine or immunogenic composition provided herein comprises adjuvants or is administered together with one or more adjuvants, the adjuvants that can be used include, but are not limited to, mineral salt adjuvants or mineral salt gel adjuvants, particulate adjuvants, microparticulate adjuvants, mucosal adjuvants, and immunostimulatory adjuvants. Examples of adjuvants include, but are not limited to, aluminum salts (alum) (such as aluminum hydroxide, aluminum phosphate, and aluminum sulfate), 3 De-O-acylated monophosphoryl lipid A (MPL) (see GB 2220211), MF59 (Novartis), AS03 (GlaxoSmithKline), AS04 (GlaxoSmithKline), polysorbate 80 (Tween 80; ICL Americas, Inc.), imidazopyridine compounds (see International Application No. PCT/US2007/064857, published as International Publication No. WO2007/109812), imidazoquinoxaline compounds (see International Application No. PCT/US2007/064858, published as International Publication No. WO2007/109813) and saponins, such as QS21 (see Kensil et al., 1995, in Vaccine Design. The Subunit and Adjuvant Approach (eds. Powell & Newman, Plenum Press, NY); U.S. Pat. No. 5,057,540). In some embodiments, the adjuvant is Freund's adjuvant (complete or incomplete). Other adjuvants are oil in water emulsions (such as squalene or peanut oil), optionally in combination with immune stimulants, such as monophosphoryl lipid A (see Stoute et al., 1997, N. Engl. J. Med. 336, 86-91).

[0464] The compositions comprise the bi-segmented arenaviruses particle or tri-segmented arenavirus particle described herein alone or together with a pharmaceutically acceptable carrier. Suspensions or dispersions of the arenavirus particle or tri-segmented arenavirus particle, especially isotonic aqueous suspensions or dispersions, can be used. The pharmaceutical compositions may be sterilized and/or may comprise excipients, e.g., preservatives, stabilizers, wetting agents and/or emulsifiers, solubilizers, salts for regulating osmotic pressure and/or buffers and are prepared in a manner known per se, for example by means of conventional dispersing and suspending processes. In certain embodiments, such dispersions or suspensions may comprise viscosity-regulating agents. The suspensions or dispersions are kept at temperatures around 2° C. to 8° C., or preferentially for longer storage may be frozen and then thawed shortly before use, or alternatively may be lyophilized for storage. For injection, the vaccine or immunogenic preparations may be formulated in aqueous solutions, preferably in physiologically compatible buffers such as Hanks's solution, Ringer's solution, or physiological saline buffer. The solution may contain formulatory agents such as suspending, stabilizing and/or dispersing agents.

[0465] In certain embodiments, the compositions described herein additionally comprise a preservative, e.g., the mercury derivative thimerosal. In a specific embodiment, the pharmaceutical compositions described herein comprise 0.001% to 0.01% thimerosal. In other embodiments, the pharmaceutical compositions described herein do not comprise a preservative.

[0466] The pharmaceutical compositions comprise from about 103 to about 10¹¹ focus forming units of the bi-segmented arenavirus particle or tri-segmented arenavirus particle.

[0467] In one embodiment, administration of the pharmaceutical composition is parenteral administration. Parenteral administration can be intravenous or subcutaneous administration. Accordingly, unit dose forms for parenteral administration are, for example, ampoules or vials, e.g., vials containing from about 10³ to 10¹⁰ focus forming units or 10⁵ to 10¹⁵ physical particles of the arenavirus particle or tri-segmented arenavirus particle.

[0468] In another embodiment, a vaccine or immunogenic composition provided herein is administered to a subject by, including but not limited to, oral, intradermal, intramuscular, intraperitoneal, intravenous, topical, subcutaneous, percutaneous, intranasal and inhalation routes, intra-tumoral, and via scarification (scratching through the top layers of skin, e.g., using a bifurcated needle). Specifically, subcutaneous or intravenous routes can be used.

[0469] For administration intranasally or by inhalation, the preparation for use according to the present invention can be conveniently delivered in the form of an aerosol spray presentation from pressurized packs or a nebulizer, with the use of a suitable propellant, e.g., dichlorodifluoromethane, trichlorofluoromethane, dichlorotetrafluoroethane, carbon dioxide or other suitable gas. In the case of a pressurized aerosol the dosage unit may be determined by providing a valve to deliver a metered amount. Capsules and cartridges of, e.g., gelatin for use in an inhaler or insufflators may be formulated containing a powder mix of the compound and as suitable powder base such as lactose or starch.

[0470] The dosage of the active ingredient depends upon the type of vaccination or immunotherapy and upon the subject, and their age, weight, individual condition, the individual pharmacokinetic data, and the mode of administration. In certain embodiments, an in vitro assay is employed to help identify optimal dosage ranges. Effective doses may be extrapolated from dose response curves derived from in vitro or animal model test systems.

[0471] In certain embodiments, the vaccine, immunogenic composition, or pharmaceutical composition comprising an arenavirus particle or the tri-segmented arenavirus particle can be used as a live vaccination or immunotherapy. Exemplary doses for a live arenavirus particle may vary from 10-100, or more, PFU of live virus per dose. In some embodiments, suitable dosages of an arenavirus particle or the tri-segmented arenavirus particle are 10², 5×10², 10³, 5×10³, 10⁴, 5×10⁴, 10⁵, 5×10⁵, 10⁶, 5×10⁶, 10⁷, 5×10⁷, 10⁸, 5×10⁸, 1×10⁹, 5×10⁹, 1×10¹⁰, 5×10¹⁰, 1×10¹¹, 5×10¹¹ or 10¹² pfu, and can be administered to a subject once, twice, three or more times with intervals as often as needed. In another embodiment, a live arenavirus is formulated in a dose that is of a volume selected from the group consisting of 0.2, 0.5, 1, 2, 5, 7, 10, 15, 20, 25, 30, 35, 40, 45, and 50 mL. In certain embodiments, the dose contains 10^{5.5}-10^{9.5} infectious focus forming units of live arenavirus particle. In another embodiment, an inactivated vaccine is formulated such that it contains about 15 μg to about 100 μg, about 15 μg to about 75 μg, about 15 μg to about 50 μg, or about 15 μg to about 30 μg of an arenavirus.

[0472] In certain embodiments, for administration to children, two doses of a bi-segmented arenavirus particle or a tri-segmented arenavirus particle described herein or a composition thereof, given at least one month apart, are administered to a child. In specific embodiments for administration to adults, a single dose of the arenavirus particle or tri-segmented arenavirus particle described herein or a composition thereof is given. In another embodiment, two doses of a bi-segmented arenavirus particle or a tri-segmented arenavirus particle described herein or a composition thereof, given at least one month apart, are administered to an adult. In another embodiment, a young child (six months to nine years old) may be administered a bi-segmented arenavirus particle or a tri-segmented arenavirus particle described herein or a composition thereof for the first time in two doses given one month apart. In a particular embodiment, a child who received only one dose in their first year of vaccination or immunotherapy should receive two doses in the following year. In some embodiments, two doses administered 4 weeks apart are preferred for children 2-8 years of age who are administered an immunogenic composition described herein, for the first time. In certain embodiments, for children 6-35 months of age, a half dose (0.25 ml) may be preferred, in contrast to 0.5 ml which may be preferred for subjects over three years of age.

[0473] In certain embodiments, the compositions can be administered to the patient in a single dosage comprising a therapeutically effective amount of the arenavirus particle or the tri-segmented arenavirus particle. In some embodiments, the bi-segmented arenavirus particle or tri-segmented arenavirus particle can be administered to the patient in a single dose comprising a therapeutically effective amount of a bi-segmented arenavirus particle or tri-segmented arenavirus particle and, one or more pharmaceutical compositions, each in a therapeutically effective amount.

[0474] In certain embodiments, the composition is administered to the patient as a single dose followed by a second dose three to six weeks later. In accordance with these embodiments, the booster inoculations may be administered to the subjects at six to twelve month intervals following the second inoculation. In certain embodiments, the booster inoculations may utilize a different arenavirus or composition thereof. In some embodiments, the administration of the same composition as described herein may be repeated and separated by at least 1 day, 2 days, 3 days, 4 days, 5 days, 10 days, 15 days, 30 days, 45 days, 2 months, 75 days, 3 months, or at least 6 months.

[0475] Also provided herein, are processes and to the use the arenavirus particle or the tri-segmented arenavirus particle for the manufacture of vaccines in the form of pharmaceutical preparations, which comprise the arenavirus particle or tri-segmented arenavirus particle as an active ingredient. The pharmaceutical compositions of the present application are prepared in a manner known per se, for example by means of conventional mixing and/or dispersing processes.

### 5.13 Compositions, Administration, And Dosage

[0476] The present application furthermore relates to vaccines, immunogenic compositions (e.g., vaccine formulations), and pharmaceutical compositions comprising an arenavirus particle or a tri-segmented arenavirus particle as described herein. Such vaccines, immunogenic compositions and pharmaceutical compositions can be formulated according to standard procedures in the art.

[0477] It will be readily apparent to one of ordinary skill in the relevant arts that suitable modifications and adaptations to the methods and applications described herein can be obvious and can be made without departing from the scope of the scope or any embodiment thereof.

[0478] In another embodiment, provided herein are compositions comprising an arenavirus particle or a tri-segmented arenavirus particle described herein. Such compositions can be used in methods of treatment and prevention of disease. In a specific embodiment, the compositions described herein are used in the treatment of subjects infected with and infectious agent, or susceptible to an infection. In other embodiments, the compositions described herein are used in the treatment of subjects susceptible to or exhibiting symptoms characteristic of cancer or tumorigenesis or are diagnosed with cancer. In another specific embodiment, the immunogenic compositions provided herein can be used to induce an immune response in a host to whom the composition is administered. The immunogenic compositions described herein can be used as vaccines and can accordingly be formulated as pharmaceutical compositions. In a specific embodiment, the immunogenic compositions described herein are used in the prevention of infection or cancer of subjects (e.g., human subjects). In other embodiments, the vaccine, immunogenic composition or pharmaceutical composition are suitable for veterinary and/or human administration.

[0479] In certain embodiments, provided herein are immunogenic compositions comprising an arenavirus vector as described herein. In certain embodiments, such an immunogenic composition further comprises a pharmaceutically acceptable excipient. In certain embodiments, such an immunogenic composition further comprises an adjuvant. The adjuvant for administration in combination with a composition described herein may be administered before, concomitantly with, or after administration of said composition. In some embodiments, the term “adjuvant” refers to a compound that when administered in conjunction with or as part of a composition described herein augments, enhances and/or boosts the immune response to a arenavirus particle or tri-segmented arenavirus particle and, most importantly, the gene products it vectorises, but when the compound is administered alone does not generate an immune response to the arenavirus particle or tri-segmented arenavirus particle and the gene products vectorised by the latter. In some embodiments, the adjuvant generates an immune response to the arenavirus particle or tri-segmented arenavirus particle and the gene products vectorised by the latter and does not produce an allergy or other adverse reaction. Adjuvants can enhance an immune response by several mechanisms including, e.g., lymphocyte recruitment, stimulation of B and/or T cells, and stimulation of macrophages or dendritic cells. When a vaccine or immunogenic composition provided herein comprises adjuvants or is administered together with one or more adjuvants, the adjuvants that can be used include, but are not limited to, mineral salt adjuvants or mineral salt gel adjuvants, particulate adjuvants, microparticulate adjuvants, mucosal adjuvants, and immunostimulatory adjuvants. Examples of adjuvants include, but are not limited to, aluminum salts (alum) (such as aluminum hydroxide, aluminum phosphate, and aluminum sulfate), 3 De-O-acylated monophosphoryl lipid A (MPL) (see GB 2220211), MF59 (Novartis), ASO3 (GlaxoSmithKline), ASO4 (GlaxoSmithKline), polysorbate 80 (Tween 80; ICL Americas, Inc.), imidazopyridine compounds (see International Application No. PCT/US2007/064857, published as International Publication No. WO2007/109812), imidazoquinoxaline compounds (see International Application No. PCT/US2007/064858, published as International Publication No. WO2007/109813) and saponins, such as QS21 (see Kensil et al., 1995, in Vaccine Design: The Subunit and Adjuvant Approach (eds. Powell & Newman, Plenum Press, NY); U.S. Pat. No. 5,057,540). In some embodiments, the adjuvant is Freund's adjuvant (complete or incomplete). Other adjuvants are oil in water emulsions (such as squalene or peanut oil), optionally in combination with immune stimulants, such as monophosphoryl lipid A (see Stoute et al., 1997, N. Engl. J. Med. 336, 86-91).

[0480] The compositions comprise the arenaviruses particle or tri-segmented arenavirus particle described herein alone or together with a pharmaceutically acceptable carrier. Suspensions or dispersions of the arenavirus particle or tri-segmented arenavirus particle, especially isotonic aqueous suspensions or dispersions, can be used. The pharmaceutical compositions may be sterilized and/or may comprise excipients, e.g., preservatives, stabilizers, wetting agents and/or emulsifiers, solubilizers, salts for regulating osmotic pressure and/or buffers and are prepared in a manner known per se, for example by means of conventional dispersing and suspending processes. In certain embodiments, such dispersions or suspensions may comprise viscosity-regulating agents. The suspensions or dispersions are kept at temperatures around 2° C. to 8° C., or preferentially for longer storage may be frozen and then thawed shortly before use, or alternatively may be lyophilized for storage. For injection, the vaccine or immunogenic preparations may be formulated in aqueous solutions, preferably in physiologically compatible buffers such as Hanks's solution, Ringer's solution, or physiological saline buffer. The solution may contain formulatory agents such as suspending, stabilizing and/or dispersing agents.

[0481] In certain embodiments, the compositions described herein additionally comprise a preservative, e.g., the mercury derivative thimerosal. In a specific embodiment, the pharmaceutical compositions described herein comprise 0.001% to 0.01% thimerosal. In other embodiments, the pharmaceutical compositions described herein do not comprise a preservative.

[0482] The pharmaceutical compositions comprise from about 103 to about 10¹¹ focus forming units of the arenavirus particle or tri-segmented arenavirus particle.

[0483] In one embodiment, administration of the pharmaceutical composition is parenteral administration. Parenteral administration can be intravenous or subcutaneous administration. Accordingly, unit dose forms for parenteral administration are, for example, ampoules or vials, e.g., vials containing from about 10′ to 10¹⁰ focus forming units or 105 to 10¹⁵ physical particles of the arenavirus particle or tri-segmented arenavirus particle.

[0484] In another embodiment, a vaccine or immunogenic composition provided herein is administered to a subject by, including but not limited to, oral, intradermal, intramuscular, intraperitoneal, intravenous, topical, subcutaneous, percutaneous, intranasal and inhalation routes, and via scarification (scratching through the top layers of skin, e.g., using a bifurcated needle). Specifically, subcutaneous or intravenous routes can be used.

[0485] For administration intranasally or by inhalation, the preparation for use according to the present invention can be conveniently delivered in the form of an aerosol spray presentation from pressurized packs or a nebulizer, with the use of a suitable propellant, e.g., dichlorodifluoromethane, trichlorofluoromethane, dichlorotetrafluoroethane, carbon dioxide or other suitable gas. In the case of a pressurized aerosol the dosage unit may be determined by providing a valve to deliver a metered amount. Capsules and cartridges of, e.g., gelatin for use in an inhaler or insufflators may be formulated containing a powder mix of the compound and as suitable powder base such as lactose or starch.

[0486] The dosage of the active ingredient depends upon the type of vaccination or immunotherapy and upon the subject, and their age, weight, individual condition, the individual pharmacokinetic data, and the mode of administration. In certain embodiments, an in vitro assay is employed to help identify optimal dosage ranges. Effective doses may be extrapolated from dose response curves derived from in vitro or animal model test systems.

[0487] In certain embodiments, the vaccine, immunogenic composition, or pharmaceutical composition comprising an arenavirus particle or the tri-segmented arenavirus particle can be used as a live vaccination or immunotherapy. Exemplary doses for a live arenavirus particle may vary from 10-100, or more, PFU of live virus per dose. In some embodiments, suitable dosages of an arenavirus particle or the tri-segmented arenavirus particle are 10², 5×10², 10³, 5×10³, 10⁴, 5×10⁴, 10⁵, 5×10⁵, 10⁶, 5×10⁶, 10⁷, 5×10⁷, 10, 5×10⁸, 1×10⁹, 5×10⁹, 1×10¹⁰, 5×10¹⁰, 1×10¹¹, 5×10¹¹ or 10¹² pfu, and can be administered to a subject once, twice, three or more times with intervals as often as needed. In another embodiment, a live arenavirus is formulated such that a 0.2-mL dose contains 10^{6.5}-10^{7.5} fluorescent focal units of live arenavirus particle. In another embodiment, an inactivated vaccine is formulated such that it contains about 15 μg to about 100 μg, about 15 μg to about 75 μg, about 15 μg to about 50 μg, or about 15 μg to about 30 μg of an arenavirus.

[0488] In certain embodiments, for administration to children, two doses of an arenavirus particle or a tri-segmented arenavirus particle described herein or a composition thereof, given at least one month apart, are administered to a child. In specific embodiments for administration to adults, a single dose of the arenavirus particle or tri-segmented arenavirus particle described herein or a composition thereof is given. In another embodiment, two doses of an arenavirus particle or a tri-segmented arenavirus particle described herein or a composition thereof, given at least one month apart, are administered to an adult. In another embodiment, a young child (six months to nine years old) may be administered an arenavirus particle or a tri-segmented arenavirus particle described herein or a composition thereof for the first time in two doses given one month apart. In a particular embodiment, a child who received only one dose in their first year of vaccination or immunotherapy should receive two doses in the following year. In some embodiments, two doses administered 4 weeks apart are preferred for children 2-8 years of age who are administered an immunogenic composition described herein, for the first time. In certain embodiments, for children 6-35 months of age, a half dose (0.25 ml) may be preferred, in contrast to 0.5 ml which may be preferred for subjects over three years of age.

[0489] In certain embodiments, the compositions can be administered to the patient in a single dosage comprising a therapeutically effective amount of the arenavirus particle or the tri-segmented arenavirus particle. In some embodiments, the arenavirus particle or tri-segmented arenavirus particle can be administered to the patient in a single dose comprising a therapeutically effective amount of an arenavirus particle or tri-segmented arenavirus particle and, one or more pharmaceutical compositions, each in a therapeutically effective amount.

[0490] In certain embodiments, the composition is administered to the patient as a single dose followed by a second dose three to six weeks later. In accordance with these embodiments, the booster inoculations may be administered to the subjects at six to twelve month intervals following the second inoculation. In certain embodiments, the booster inoculations may utilize a different arenavirus or composition thereof. In some embodiments, the administration of the same composition as described herein may be repeated and separated by at least 1 day, 2 days, 3 days, 4 days, 5 days, 10 days, 15 days, 30 days, 45 days, 2 months, 75 days, 3 months, or at least 6 months.

[0491] Also provided herein, are processes and to the use the arenavirus particle or the tri-segmented arenavirus particle for the manufacture of vaccines in the form of pharmaceutical preparations, which comprise the arenavirus particle or tri-segmented arenavirus particle as an active ingredient. The pharmaceutical compositions of the present application are prepared in a manner known per se, for example by means of conventional mixing and/or dispersing processes.

### 5.14 Assays

[0492] In certain embodiments, an arenavirus particle described herein comprises the nucleotide sequence provided herein (see Section 5.5.2). In certain embodiments, an arenavirus particle described herein is engineered such that an arenaviral ORF is separated over two or more mRNA transcripts (see Section 5.6). In certain embodiments, an arenavirus particle described herein is derived from an arenavirus genomic or antigenomic segment provided herein (see Section 5.7). In certain embodiments, an arenavirus particle described herein comprises an arenavirus genomic or antigenomic segment provided herein (see Section 5.7).

[0493] In certain embodiments, the arenavirus particle provided herein is genetically stable, i.e. the inability of the arenavirus particle to revert to wild-type-like (more virulent) replication behavior in the host (genetic stability). In certain embodiments, the genetic stability may be demonstrated using assays described in this Section and Section 6.

[0494] In certain embodiments, the arenavirus particle provided herein shows high-level transgene expression to elicit strong immune responses against the desired target antigen(s) (transgene expression levels). In certain embodiments, the high-level transgene expression may be demonstrated using assays described in this Section and Section 6.

[0495] In certain embodiments, the arenavirus particle expresses a heterologous non-arenaviral polypeptide. In certain embodiments, the heterologous non-arenaviral polypeptide is under control of an arenavirus 3′ UTR. In certain embodiments, the expression level of the heterologous non-arenaviral polypeptide is at least about 1%, 2%, 3%, 4%, 5%, 6%, 7%, 8%, 9%, 10%, 15%, 20%, 30%, 40%, 50%, 60%, 70%, 80%, 90%, 100%, 1.5-fold, 2-fold, 3-fold, 4-fold, 5-fold, 6-fold, 7-fold, 8-fold, 9-fold, 10-fold, 12-fold, 15-fold, 18-fold, 20-fold, 25-fold, or 30-fold higher than the expression level of the same heterologous non-arenaviral polypeptide expressed under control of the respective arenavirus 5′ UTR. In certain embodiments, the expression level of the heterologous non-arenaviral polypeptide is about 1%, 2%, 3%, 4%, 5%, 6%, 7%, 8%, 9%, 10%, 15%, 20%, 30%, 40%, 50%, 60%, 70%, 80%, 90%, 100%, 1.5-fold, 2-fold, 3-fold, 4-fold, 5-fold, 6-fold, 7-fold, 8-fold, 9-fold, 10-fold, 12-fold, 15-fold, 18-fold, 20-fold, 25-fold, or 30-fold higher than the expression level of the same heterologous non-arenaviral polypeptide expressed under control of the respective arenavirus 5′ UTR. In certain embodiments, the expression level of the heterologous non-arenaviral polypeptide is 1%, 2%, 3%, 4%, 5%, 6%, 7%, 8%, 9%, 10%, 15%, 20%, 30%, 40%, 50%, 60%, 70%, 80%, 90%, 100%, 1.5-fold, 2-fold, 3-fold, 4-fold, 5-fold, 6-fold, 7-fold, 8-fold, 9-fold, 10-fold, 12-fold, 15-fold, 18-fold, 20-fold, 25-fold, or 30-fold higher than the expression level of the same heterologous non-arenaviral polypeptide expressed under control of the respective arenavirus 5′ UTR. In certain embodiments, at least about, or about, 5%, 10%, 15%, 20%, 25%, 30%, 35%, 40%, 45%, 50%, 55%, 60%, 65%, 70%, 75%, 80%, 85%, 90%, 95%, 99%, or 100% of cells express the heterologous non-arenaviral polypeptide after an arenavirus of the present disclosure (e.g., expressing a heterologous non-arenaviral polypeptide under control of an arenavirus 3′ UTR) is introduced to (or infects) the cells (e.g., to a population of cells). In certain embodiments, the proportion of cells that express the heterologous non-arenaviral polypeptide after an arenavirus of the present disclosure (e.g., expressing a heterologous non-arenaviral polypeptide under control of an arenavirus 3′ UTR) is introduced to (or infects) a population of cells is higher as compared to the proportion of cells that express the heterologous non-arenaviral polypeptide after an arenavirus expressing the same heterologous non-arenaviral polypeptide under control of an arenavirus 5′ UTR is introduced to (or infects) a population of cells. In certain embodiments, at least about, or about 1%, 2%, 3%, 4%, 5%, 6%, 7%, 8%, 9%, 10%, 15%, 20%, 25%, 30%, 35%, 40%, 45%, 50%, 55%, 60%, 65%, 70%, 75%, 80%, 85%, 90%, 95%, 99%, or 100% more cells express the heterologous non-arenaviral polypeptide after an arenavirus of the present disclosure (e.g., expressing a heterologous non-arenaviral polypeptide under control of an arenavirus 3′ UTR) is introduced to (or infects) a population of cells as compared to the proportion (or amount) of cells that express the heterologous non-arenaviral polypeptides after an arenavirus expressing the same heterologous non-arenaviral polypeptide under control of an arenavirus 5′ UTR is introduced to (or infects) a comparable population of cells. In certain embodiments, the cells are from a biological sample from a subject. In certain embodiments, the biological sample is from an organ (e.g., spleen). In certain embodiments, the biological sample is a blood sample.

[0496] In certain embodiments, at least about, or about, 5%, 10%, 15%, 20%, 25%, 30%, 35%, 40%, 4%5% 50%, 55%, ⁶⁰, 65%, 70%, 75%, ⁸⁰, 85%, 90%, 95%, 99%, or 100% of cells express a heterologous non-arenaviral polypeptide and/or express a second heterologous non-arenaviral polypeptide after an arenavirus of the present disclosure (e.g., expressing the heterologous non-arenaviral polypeptide under control of an arenavirus 3′ UTR and/or expressing the second heterologous non-arenaviral polypeptide under control of an arenavirus 3′ UTR) is introduced to (or infects) the cells (e.g., to a population of cells). In certain embodiments, the proportion of cells that express the heterologous non-arenaviral polypeptide and/or express the second heterologous non-arenaviral polypeptide after an arenavirus of the present disclosure (e.g., expressing the heterologous non-arenaviral polypeptide under control of an arenavirus 3′ UTR and/or expressing the second heterologous non-arenaviral polypeptide under control of an arenavirus 3′ UTR) is introduced to (or infects) a population of cells is higher as compared to the proportion of cells that express the heterologous non-arenaviral polypeptide or the second heterologous non-arenaviral polypeptide after an arenavirus expressing the same heterologous non-arenaviral polypeptide under control of an arenavirus 5′ UTR and/or expressing the same second heterologous non-arenaviral polypeptide under control of an arenavirus 5′ UTR is introduced to (or infects) a population of cells. In certain embodiments, at least about, or about 1%, 2%, 3%, 4%, 5%, 6%, 7%, 8%, 9%, 10%, 15%, 20%, 25%, 30%, 35%, 40%, 45%, 50%, 55%, 60%, 65%, 70%, 75%, 80%, 85%, 90%, 95%, 99%, or 100% more cells express the heterologous non-arenaviral polypeptide and/or express the second heterologous non-arenaviral polypeptide after an arenavirus of the present disclosure (e.g., expressing the heterologous non-arenaviral polypeptide under control of an arenavirus 3′ UTR and/or expressing the second heterologous non-arenaviral polypeptide under control of an arenavirus 3′ UTR) is introduced to (or infects) a population of cells as compared to the proportion (or amount) of cells that express the heterologous non-arenaviral polypeptides and/or express the second heterologous non-arenaviral polypeptides after an arenavirus expressing the same heterologous non-arenaviral polypeptide under control of an arenavirus 5′ UTR and/or expressing the same second heterologous non-arenaviral polypeptide under control of an arenavirus 5′ UTR is introduced to (or infects) a comparable population of cells. In certain embodiments, the cells are from a biological sample from a subject. In certain embodiments, the biological sample is from an organ (e.g., spleen). In certain embodiments, the biological sample is a blood sample.

[0497] In certain embodiments, the arenavirus particle expresses two heterologous non-arenaviral polypeptides. In certain embodiments, expression of one heterologous non-arenaviral polypeptide is under control of an arenavirus 3′ UTR and expression of the other heterologous non-arenaviral polypeptide is under control of an arenavirus 5′ UTR. In certain embodiments, the expression of a first of the two heterologous non-arenaviral polypeptides is under control of an arenavirus 3′ UTR in a first S segment and the expression of a second of the two heterologous non-arenaviral polypeptides is under control of an arenavirus 5′ UTR in a second S segment. In certain embodiments, the expression of one heterologous non-arenaviral polypeptide is under control of an arenavirus 3′ UTR in one S segment and the expression of the other heterologous non-arenaviral polypeptide is under control of an arenavirus 5′ UTR in the other S segment. In certain embodiments, the expression of a first of the two heterologous non-arenaviral polypeptides is under control of an arenavirus 5′ UTR in a first S segment and the expression of a second of the two heterologous non-arenaviral polypeptides is under control of an arenavirus 3′ UTR in a second S segment. In certain embodiments, the expression of one heterologous non-arenaviral polypeptide is under control of an arenavirus 5′ UTR in one S segment and the expression of the other heterologous non-arenaviral polypeptide is under control of an arenavirus 3′ UTR in the other S segment. In certain embodiments, cells that are infected with the arenavirus particle of the present disclosure (e.g., expressing one heterologous non-arenaviral polypeptide under control of an arenavirus 3′ UTR in one S segment and expressing another heterologous non-arenaviral polypeptide under control of an arenavirus 5′ UTR in another S segment) express (co-express) both heterologous non-arenaviral polypeptides. In certain embodiments, the combined expression level of the two heterologous non-arenaviral polypeptides (e.g., cells expressing both heterologous non-arenaviral polypeptides) is at least about 1%, 2%, 3%, 4%, 5%, 6%, 7%, 8%, 9%, 10%, 15%, 20%, 30%, 40%, 50%, 60%, 70%, 80%, 90%, 100%, 1.5-fold, 2-fold, 3-fold, 4-fold, 5-fold, 6-fold, 7-fold, 8-fold, 9-fold, 10-fold, 12-fold, 15-fold, 18-fold, 20-fold, 25-fold, or 30-fold higher than the combined expression level of the same two heterologous non-arenaviral polypeptides expressed under control of arenavirus 5′ UTRs (e.g., expression of one heterologous non-arenaviral polypeptide is under control of an arenavirus 5′ UTR of one S segment and expression of the other heterologous non-arenaviral polypeptide is under control of an arenavirus 5′ UTR of the other S segment). In certain embodiments, the combined expression level of the two heterologous non-arenaviral polypeptides (e.g., cells expressing both heterologous non-arenaviral polypeptides) is about 1%, 2%, 3%, 4%, 5%, 6%, 7%, 8%, 9%, 10, 1%, 20%, 30%, 40%, 50%, 60%, 70%, 80%, 90%, 100%, 1.5-fold, 2-fold, 3-fold, 4-fold, 5-fold, 6-fold, 7-fold, 8-fold, 9-fold, 10-fold, 12-fold, 15-fold, 18-fold, 20-fold, 25-fold, or 30-fold higher than the combined expression level of the same two heterologous non-arenaviral polypeptides expressed under control of arenavirus 5′ UTRs (e.g., expression of one heterologous non-arenaviral polypeptide under control of an arenavirus 5′ UTR of one S segment and expression of the other heterologous non-arenaviral polypeptide under control of an arenavirus 5′ UTR of the other S segment). In certain embodiments, the combined expression level of the two heterologous non-arenaviral polypeptides (e.g., cells expressing both heterologous non-arenaviral polypeptides) is 1%, 2%, 3%, 4%, 5%, 6%, 7%, 8%, 9%, 10%, 15%, 20%, 30%, 40%, 50%, 60%, 70%, 80%, 90%, 100%, 1.5-fold, 2-fold, 3-fold, 4-fold, 5-fold, 6-fold, 7-fold, 8-fold, 9-fold, 10-fold, 12-fold, 15-fold, 18-fold, 20-fold, 25-fold, or 30-fold higher than the combined expression level of the same two heterologous non-arenaviral polypeptides expressed under control of arenavirus 5′ UTRs (e.g., expression of one heterologous non-arenaviral polypeptide under control of an arenavirus 5′ UTR of one S segment and expression of the other heterologous non-arenaviral polypeptide under control of an arenavirus 5′ UTR of the other S segment). In certain embodiments, at least about, or about, 5%, 10%, 15%, 20%, 25%, 30%, 35%, 40%, 45%, 50%, 55%, 60%, 65%, 70%, 75%, 80%, 85%, 90%, 95%, 99%, or 100% of cells express (co-express) the two heterologous non-arenaviral polypeptides after an arenavirus of the present disclosure (e.g., expressing one heterologous non-arenaviral polypeptide under control of an arenavirus 3′ UTR in one S segment and expressing another heterologous non-arenaviral polypeptide under control of an arenavirus 5′ UTR in another S segment) is introduced to (or infects) the cells (e.g., to a population of cells). In certain embodiments, the proportion (or amount) of cells that express (co-express) the two heterologous non-arenaviral polypeptides after an arenavirus of the present disclosure (e.g., expressing one heterologous non-arenaviral polypeptide under control of an arenavirus 3′ UTR in one S segment and expressing another heterologous non-arenaviral polypeptide under control of an arenavirus 5′ UTR in another S segment) is introduced to (or infects) a population of cells is higher as compared to the proportion (or amount) of cells that express (co-express) the two heterologous non-arenaviral polypeptides after an arenavirus expressing the same two heterologous non-arenaviral polypeptides under control of arenavirus 5′ UTRs (e.g., one heterologous non-arenaviral polypeptide expressed under control of an arenavirus 5′ UTR of one S segment and the other heterologous non-arenaviral polypeptide expressed under control of an arenavirus 5′ UTR of the other S segment) is introduced to (or infects) a population of cells. In certain embodiments, at least about 1%, 2%, 3%, 4%, 5%, 6%, 7%, 8%, 9%, 10%, 15%, 20%, 25%, 30%, 35%, 40%, 45%, 50%, 55%, 60%, 65%, 70%, 75%, 80%, 85%, 90%, 95%, 99%, or 100% more cells express (co-express) the two heterologous non-arenaviral polypeptides after an arenavirus of the present disclosure (e.g., expressing one heterologous non-arenaviral polypeptide under control of an arenavirus 3′ UTR in one S segment and expressing another heterologous non-arenaviral polypeptide under control of an arenavirus 5′ UTR in another S segment) is introduced to (or infects) a population of cells as compared to the proportion (or amount) of cells that express (co-express) the two heterologous non-arenaviral polypeptides after an arenavirus expressing the same two heterologous non-arenaviral polypeptides under control of arenavirus 5′ UTRs (e.g., expressing one heterologous non-arenaviral polypeptide under control of an arenavirus 5′ UTR of one S segment and expressing the other heterologous non-arenaviral polypeptide under control of an arenavirus 5′ UTR of the other S segment) is introduced to (or infects) a comparable population of cells. In certain embodiments, the cells are from a biological sample from a subject. In certain embodiments, the biological sample is from an organ (e.g., spleen). In certain embodiments, the biological sample is a blood sample.

[0498] In certain embodiments, the arenavirus particle provided herein may show good growth in cell culture, enabling the arenavirus particle's production to high titers in industrial fermentation processes (production yields). In certain embodiments, the good growth in cell culture may be demonstrated using the assays described in this Section and in Section 6.

[0499] In certain embodiments, the titer of the arenavirus particle of the disclosure is at least about 1%, 2%, 3%, 4%, 5%, 6%, 7%, 8%, 9%, 10%, 15%, 20%, 30%, 40%, 50%, 60%, 70%, 80%, 90%, 100%, 1.5-fold, 2-fold, 3-fold, 4-fold, 5-fold, 6-fold, 7-fold, 8-fold, 9-fold, 10-fold, 12-fold, 15-fold, 18-fold, 20-fold, 25-fold, or 30-fold lower during a persistent infection in AGRAG mice than the titer of the respective wild-type parental arenavirus particle. In certain embodiments, the titer of the arenavirus particle of the disclosure is about 1%, 2%, 3%, 4%, 5%, 6%, 7%, 8%, 9%, 10%, 15%, 20%, 30%, 40%, 50%, 60%, 70%, 80%, 90%, 100%, 1.5-fold, 2-fold, 3-fold, 4-fold, 5-fold, 6-fold, 7-fold, 8-fold, 9-fold, 10-fold, 12-fold, 15-fold, 18-fold, 20-fold, 25-fold, or 30-fold lower during a persistent infection in AGRAG mice than the titer of the respective wild-type parental arenavirus particle. In certain embodiments, the titer of the arenavirus particle of the disclosure is 1%, 2%, 3%, 4%, 5%, 6%, 7%, 8%, 9%, 10%, 15%, 20%, 30%, 40%, 50%, 60%, 70%, 80%, 90%, 100%, 1.5-fold, 2-fold, 3-fold, 4-fold, 5-fold, 6-fold, 7-fold, 8-fold, 9-fold, 10-fold, 12-fold, 15-fold, 18-fold, 20-fold, 25-fold, or 30-fold lower during a persistent infection in AGRAG mice than the titer of the respective wild-type parental arenavirus particle. In certain embodiments, a persistent infection may be an infection that lasts at least 5 days, 10 days, 14 days, 20 days, 25 days, 30 days, 35 days, 40 days, 45 days, 50 days, 53 days, 55 days, 60 days, 65 days, 70 days, 75 days, 78 days, 80 days, 90 days, or 100 days. In certain embodiments, a persistent infection may be an infection that lasts 5 days, 10 days, 14 days, 20 days, 25 days, 30 days, 35 days, 40 days, 45 days, 50 days, 53 days, 55 days, 60 days, 65 days, 70 days, 75 days, 78 days, 80 days, 90 days, or 100 days.

### 5.14.1 Arenavirus Detection Assays

[0500] The skilled artesian could detect an arenavirus genomic or antigenomic segment or tri-segmented arenavirus particle, as described herein using techniques known in the art. For example, RT-PCR can be used with primers that are specific to a genetically engineered arenavirus segment to detect and quantify an arenavirus genomic or antigenomic segment as described herein in section 5.7. Western blot, ELISA, radioimmunoassay, immunoprecipitation, or immunocytochemistry in conjunction with flow cytometry can be used to quantify the gene products of the arenavirus genomic or antigenomic segment or tri-segmented arenavirus particle.

### 5.14.2 Assay to Measure Infectivity

[0501] Any assay known to the skilled artisan can be used for measuring the infectivity of an arenavirus vector preparation. For example, determination of the virus/vector titer can be done by a “focus forming unit assay” (FFU assay). In brief, complementing cells are plated and inoculated with different dilutions of a virus/vector sample. For determination of replication-deficient arenavirus vector titers, complementing (e.g. glycoprotein-expressing cells in the case of glycoprotein-deficient arenavirus vectors) BHK-21 of HEK293 cells are used. For replication-competent vectors e.g., MC57, 3T3 or VERO cells are common cell substrates. After an incubation period, to allow cells to form a monolayer and virus to attach to cells, the monolayer is covered with Methylcellulose. When the plates are further incubated, the original infected cells release viral progeny. Due to the Methylcellulose overlay the spread of the new viruses is restricted to neighboring cells. Consequently, each infectious particle produces a circular zone of infected cells called a Focus. Such Foci can be made visible and by that countable using antibodies against the respective arenavirus' NP or another protein expressed by the arenavirus particle or the tri-segmented arenavirus particle and a HRP-based color reaction. The titer of a virus/vector can be calculated in focus-forming units per milliliter (FFU/mL).

### 5.14.3 Growth of an Arenavirus Particle

[0502] Growth of an arenavirus particle described herein can be assessed by any method known in the art or described herein (e.g., cell culture). Viral growth may be performed by inoculating serial dilutions of an arenavirus particle described herein into cell cultures (e.g., Vero cells or BHK-21 cells or complementing versions thereof in case of replication-deficient vectors). After incubation of the virus for a specified time, the supernatant containing virus is collected and virions can be purified using standard methods.

### 5.14.4 Serum ELISA

[0503] Determination of the humoral immune response upon vaccination or immunotherapy of animals (e.g., mice, guinea pigs) can be done by antigen-specific serum ELISA's (enzyme-linked immunosorbent assays). In brief, plates are coated with antigen (e.g., recombinant protein), blocked to avoid unspecific binding of antibodies and incubated with serial dilutions of sera. After incubation, bound serum-antibodies can be detected, e.g., using an enzyme-coupled anti-species (e.g., mouse, guinea pig)-specific antibody (detecting total IgG or IgG subclasses) and subsequent color reaction. Antibody titers can be determined as, e.g., endpoint geometric mean titer.

### 5.14.5 Assay to Measure the Neutralizing Activity of Induced Antibodies

[0504] Determination of the neutralizing antibodies in sera can be performed by plaque reduction neutralization tests. Depending on the viral target, suitable cells are used, such as ARPE-19 cells from ATCC for testing cytomegalovirus-neutralizing antibodies and a GFP-tagged virus (for example, cytomegalovirus) as test article. In addition, supplemental guinea pig serum as a source of exogenous complement may be used. The assay is started with seeding of 6.5×10′ cells/well (50 μl/well) in a 384 well plate one or two days before using for neutralization. The neutralization is performed by mixing of a defined virus inoculum in 96-well sterile tissue culture plates without cells but with titrated concentrations of test serum for 1 hour at 37° C. After the neutralization incubation step the mixture is added to the cells and incubated for additional 4 days for GFP-detection with a plate reader. Alternatively, instead of GFP or similar reporters, a viral structural protein can be detected as described in section 5.14.2. A positive neutralizing human sera is used as assay positive control on each plate to check the reliability of all results. Titers (EC50) are determined using a 4 parameter logistic curve fitting. As additional testing the wells are checked with a fluorescence microscope.

### 5.14.6 LCMV Plaque Reduction Neutralization Test

[0505] In brief, plaque reduction (neutralization) assays for LCMV can be performed by use of a replication-competent or -deficient LCMV that is tagged with green fluorescent protein, 5% rabbit serum may be used as a source of exogenous complement, and plaques can be enumerated by fluorescence microscopy. Neutralization titers may be defined as the highest dilution of serum that results in a 50%, 75%, 90% or 95% reduction in plaques, compared with that in control (pre-immune) serum samples.

### 5.14.7 Determination of LCMV Genome Copies

[0506] qPCR LCMV RNA genomes are isolated using QIAamp Viral RNA mini Kit (QIAGEN), according to the protocol provided by the manufacturer. LCMV RNA genome equivalents are detected by quantitative PCR carried out on an StepOnePlus Real Time PCR System (Applied Biosystems) with SuperScript® III Platinum® One-Step qRT-PCR Kit (Invitrogen) and primers and probes (FAM reporter and NFQ-MGB Quencher) specific for part of the LCMV NP coding region or another genomic stretch of the arenavirus particle or the tri-segmented arenavirus particle. The temperature profile of the reaction may be: 30 min at 60° C., 2 min at 95° C., followed by 45 cycles of 15 s at 95° C., 30 s at 56° C. RNA can be quantified by comparison of the sample results to a standard curve prepared from a log 10 dilution series of a spectrophotometrically quantified, in vitro-transcribed RNA fragment, corresponding to a fragment of the LCMV NP coding sequence or another genomic stretch of the arenavirus particle or the tri-segmented arenavirus particle containing the primer and probe binding sites.

### 5.14.8 Western Blotting

[0507] Infected cells grown in tissue culture flasks or in suspension are lysed at specific time points post infection using RIPA buffer (Thermo Scientific) or used directly without cell-lysis. Samples are heated to 99° C. for 10 minutes with reducing agent and NuPage LDS Sample buffer (Novex, Thermo Fisher Scientific, USA) and chilled to room temperature before loading on 4-12% SDS-gels for electrophoresis. Proteins are blotted onto membranes using Invitrogens iBlot Gel transfer Device and visualized by Ponceau staining. Finally, the preparations are probed with a primary antibody directed against proteins of interest and alkaline phosphatase conjugated secondary antibodies followed by staining with 1-Step NBT/BCIP solution (Invitrogen, USA).

### 5.14.9 MHC-Peptide Multimer Staining Assay for Detection of Antigen-Specific CD8+ T-Cells

[0508] Any assay known to the skilled artisan can be used to test antigen-specific CD8+ T-cell responses. For example, the MHC-peptide tetramer staining assay can be used (see, e.g., Altman J. D. et al., Science. 1996; 274:94-96; and Murali-Krishna K. et al., Immunity. 1998; 8:177-187). Briefly, the assay comprises the following steps, a tetramer assay is used to detect the presence of antigen specific T-cells. In order for a T-cell to detect the peptide to which it is specific, it must both recognize the peptide and the tetramer of MHC molecules custom made for a defined antigen specificity and MHC haplotype of T-cells (typically fluorescently labeled). The tetramer is then detected by flow cytometry via the fluorescent label.

### 5.14.10 ELISPOT Assay for Detection of Antigen-Specific T-cells.

[0509] Any assay known to the skilled artisan can be used to test antigen-specific T-cell responses (CD4+ and CD8+). For example, the ELISPOT assay can be used (see, e.g., Czerkinsky C. C. et al., J Immunol Methods. 1983; 65:109-121; and Hutchings P. R. et al., J Immunol Methods. 1989; 120:1-8). Briefly, the assay comprises the following steps: An immunospot plate is coated with an anti-cytokine antibody. Cells are incubated in the immunospot plate in the presence of specific stimulus e.g. peptides against which reactivity is to be tested. Cells secrete cytokines and are then washed off. Plates are then coated with a second biotyinlated-anticytokine antibody and cytokine secretion spots are visualized with an avidin-HRP system. 5.14.11 Intracellular Cytokine Assay for Detection of Functionality of CD8+ and CD4+ T-cell Responses.

[0510] Any assay known to the skilled artisan can be used to test the functionality of CD8+ and CD4+ T cell responses. For example, the intracellular cytokine assay combined with flow cytometry can be used (see, e.g., Suni M. A. et al., J Immunol Methods. 1998; 212:89-98; Nomura L. E. et al., Cytometry. 2000; 40:60-68; and Ghanekar S. A. et al., Clinical and Diagnostic Laboratory Immunology. 2001; 8:628-63). Briefly, the assay comprises the following steps: activation of cells via specific peptides or protein, an inhibition of protein transport (e.g., brefeldin A) is added to retain the cytokines within the cell. After a defined period of incubation, typically 5 hours, a washing steps follows, and antibodies to other cellular markers can be added to the cells. Cells are then fixed and permeabilized. The flurochrome-conjugated anti-cytokine antibodies are added and the cells can be analyzed by flow cytometry.

### 5.14.12 Assay for Confirming Replication-Deficiency of Viral Vectors

[0511] Any assay known to the skilled artisan that determines concentration of infectious and replication-competent virus particles can also be used as a to measure replication-deficient viral particles in a sample. For example, FFU assays with non-complementing cells can be used for this purpose.

[0512] Furthermore, plaque-based assays are a standard method used to determine virus concentration in terms of plaque forming units (PFU) in a virus sample. Specifically, a confluent monolayer of non-complementing host cells is infected with the virus at varying dilutions and covered with a semi-solid medium, such as agar to prevent the virus infection from spreading indiscriminately. A viral plaque is formed when a virus successfully infects and replicates itself in a cell within the fixed cell monolayer, and spreads to surrounding cells (see, e.g., Kaufmann, S. H.; Kabelitz, D. (2002). Methods in Microbiology Vol. 32:Immunology of Infection. Academic Press. ISBN 0-12-521532-0), and thereby exerts a cytopathic or lytic effect. Plaque formation can take 2-14 days, depending on the virus being analyzed. Plaques are generally counted manually and the results, in combination with the dilution factor used to prepare the plate, are used to calculate the number of plaque forming units per sample unit volume (PFU/mL). The PFU/mL result represents the number of infective replication-competent particles within the sample. When C-cells are used, the same assay can be used to titrate replication-deficient arenavirus particles or tri-segmented arenavirus particles.

5.14.13 Assay for Expression of Viral Antigens Including Transgenically Inserted Non-Arenaviral Polypeptides Expressed from Viral Vectors

[0513] Any assay known to the skilled artisan can be used for measuring expression of viral antigens and transgenically inserted non-arenaviral polypeptides expressed from viral vectors. For example, FFU assays can be performed. For detection, mono- or polyclonal antibody preparation(s) against the respective viral antigens are used (transgene-specific FFU). Methods to determine the binding of specific antibodies to proteins expressed by the replication-competent or -deficient virus (viral structural proteins, viral non-structural proteins and transgenically inserted non-arenaviral polypeptides) comprise flow cytometry, immunocytochemistry, Immunofluorescence, Western Blot or dot blot. Fluorescent reporter proteins can be visualized by direct fluorescence microscopy or flow cytometry.

### 5.14.14 Animal Models

[0514] To investigate recombination and infectivity of an arenavirus particle described herein in vivo animal models can be used. In certain embodiments, the animal models that can be used to investigate recombination and infectivity of a tri-segmented arenavirus particle include mouse, guinea pig, rabbit, and monkeys. In a preferred embodiment, the animal models that can be used to investigate recombination and infectivity of an arenavirus include mouse. In a more specific embodiment, the mice, which can be used to investigate recombination and infectivity of an arenavirus particle, are triple-deficient for type I interferon receptor, type II interferon receptor and recombination activating gene 1 (RAG1).

[0515] In certain embodiments, the animal models can be used to determine arenavirus infectivity and transgene stability. In some embodiments, viral RNA can be isolated from the serum of the animal. Techniques are readily known by those skilled in the art. The viral RNA can be reverse transcribed and the cDNA carrying the arenavirus ORFs can be PCR-amplified with gene-specific primers. Flow cytometry can also be used to investigate arenavirus infectivity and transgene expression.

### 6. EXAMPLES

### 6.1 the Hierarchy of Vector Fitness and Viability is Influenced by the Amino Acid Sequence Stretch Immediately Downstream of the Predicted Glycoprotein Signal Peptide Cleavage Site

[0516] The arenavirus glycoprotein precursor GPC is inserted into the endoplasmid reticulum, followed by cleavage of its signal peptide, which remains non-covalently associated with the GP1 and GP2 subunits of GPC to form a tri-partite glycoprotein complex on infectious virions. The aforementioned arenavirus glycoprotein stable signal peptide (SSP) is commonly referred to as 58 amino acids (Aa) in length (Agnihothram, S S, et al. (2006) J Virol 80, 5189-5198; Eichler R, et al. (2003) EMBO Rep 4, 1084-1088; Schrempf S, et al. (2007) J Virol 81, 12515-12524). In this example, the Pichinde virus (PICV) glycoprotein sequence (PICV-GP) was submitted to the online signal peptide prediction algorithm PrediSi (PrediSi (Prediction of SIgnalpeptides) website (from the Technical University of Braunschweig)) and it was predicted that the signal peptide cleavage occurred between amino acids 59 and 60 (FIG. 2). This prediction resulted in a 59Aa-long signal peptide and the downstream GP1/GP2 sequences of PICV-GP from amino acids 60-508 of GPC.

[0517] It was hypothesized that the wildtype PICV genome (FIG. 3A) could be converted into replication- and propagation-competent (i.e., “replication-competent”) tri-segmented PICV vectors. The genome would express the SSP and the GP1/GP2 portions of PICV-GP from separate transcriptional units and would, additionally, carry two non-arenaviral polypeptides. As described in FIGS. 3B and 3C, tri-segmented PICV vector genomes expressing as heterologous non-arenaviral polypeptides green fluorescent protein (GFP) and Tomato (TOM) were designed. GFP was expressed downstream and in-frame with the SSP under control of the genomic 3′ UTR promoter of the S segment 1 (S1), whereas the GP1/GP2 domains were expressed under control of the S1 segment's genomic 5′UTR promoter, preceded by an upstream in-frame heterologous non-arenaviral signal peptide, in this case the signal peptide of the vesicular stomatitis virus glycoprotein. The S segment 2 (S2) expressed the viral nucleoprotein and TOM under control of the genomic 3′ UTR and 5′ UTR promoters, respectively. Next, signal peptide lengths of 58Aa or 59Aa and GP1/GP2 domains corresponding to amino acids 59-508 or 60-508 of GPC, respectively, could generate replication-competent PICV vectors denominated PICV-Split58-(TOM/GFP) and PICV-Split59-(TOM/GFP), respectively (FIGS. 3A-3C).

[0518] BHK-21 cells stably expressing the lymphocytic choriomeningitis virus (LCMV) glycoprotein (Flatz L, et al. Nat Med 2010; 16, 339-345) were co-transfected with plasmids:
[0519] i) polymerase-I-based expression plasmid encoding for a wildtype PICV L segment (pol-I-L),
[0520] ii) polymerase-I-based expression plasmids encoding for the respective PICV vectors' S1 and S2 segments (Pol-I-S1, Pol-I-S2), and iii) polymerase-II-driven expression plasmids for the PICV trans-acting factors L and NP (pC-L, pC-NP) (FIG. 4). Three days after transfection, the cells were passaged from M6 wells to T25 flasks and six days after transfection GFP and TOM expression in the cultures were determined by fluorescence microscopy (FIG. 5A). In addition to TOM-expressing cells, PICV-Split59-(TOM/GFP) rescue cultures exhibited bright and wide-spread GFP expression, suggesting the spread of a GFP-expressing, replication-competent vector. Infectious titers in the culture supernatants were determined seven days after transfection by immunofocus assays (FIG. 5B). 3T3 cells were used to selectively determine focus formation by replication-competent vector particles (FIG. 5B, “3T3 titer”). Further, 293T-GP cells, which express the LCMV glycoprotein and thus also allow for the formation of infectious foci by vector particles that lack a functional GP and/or are devoid of the S1 segment were used to determine the total infectivity of both replication-deficient and replication-competent particles (FIG. 5B, “293T-GP titer”). It was observed that both PICV-Split58-(TOM/GFP) and PICV-Split59-(TOM/GFP) reached comparable titers of replication-competent vectors (assessed on 3T3 cells, FIG. 5B); and the titers were similar based on the totality of replication-competent and replication-deficient vector particles as determined on 293T-GP cells (FIG. 5B). To determine potential fitness differences between PICV-Split58-(TOM/GFP) and PICV-Split59-(TOM/GFP), fresh BHK-21 cells were infected with vector at multiplicity of infection (MOI) of 0.01 and the replication-competent vector titers (3T3 titers) in supernatant were determined over time (FIG. 5C). While peak titers of the two vectors were in comparable ranges, PICV-Split59-(TOM/GFP) grew more rapidly, reaching peak titers earlier than PICV-Split58-(TOM/GFP), indicating that PICV-Split59-(TOM/GFP) was superior. These results suggested that a PICV signal peptide consisting of the 59 N-terminal amino acids of PICV GPC and a GP1/GP2 sequence corresponding to Aa60-508 of PICV GPC represented preferable definitions of functional domains that could be segregated in PICV-Split vectors.

[0521] In order to generalize this concept, a non-oncogenic fusion antigen (E7E6) comprising the HPV16 E7 and E6 proteins (Cassetti et al. Vaccine 2004; 3-4, 520-527) was inserted downstream of SSP in the S1 segment. PICV-Split58-(TOM/E7E6) and PICV-Split59-(TOM/E7E6) vector genomes were used (FIGS. 6A-5B) and an artPICV vector expressing the same heterologous non-arenaviral polypeptides TOM and E7E6 (artPICV-(TOM/E7E6)) was used as a control (FIG. 6C). Transfections for the rescue of these vectors were performed as mentioned above, and infectious titers in culture supernatants were determined nine days after transfection. Intriguingly, neither the PICV-Split58-(TOM/E7E6) nor the PICV-Split59-(TOM/E7E6) vector yielded titers of replication-competent particles that were detectable on 3T3 cells, while artPICV-(TOM/E7E6) reached substantial titers. When vector titers were determined on LCMV GP-complementing 293T-GP cells, however, all three vector rescue cultures exhibited infectious non-replicating vector titers >10E5 focus-forming units (FFU) per milliliter of culture (FIG. 6D). This finding indicated that all transfections had been comparably efficient, thus yielding comparable quantities of replication-deficient vector particles. At the same time, it suggested that the GP-expressing S1 segments of PICV-Split(58)-(TOM/E7E6) and PICV-Split59-(TOM/E7E6), the only genetic difference between these two vectors and artPICV-(TOM/E7E6), failed to supply a functional glycoprotein complex, which would have allowed for the formation of replication-competent vector particles as observed for artPICV-(TOM/E7E6).

[0522] This experimental finding was intriguing and unexpected: the finding that PICV-Split(58)-(TOM/GFP) and PICV-Split59-(TOM/GFP) but neither PICV-Split(58)-(TOM/E7E6) nor PICV-Split59-(TOM/E7E6) formed replication-competent vectors was apparently related to these vectors differential S1 segment, since their S2 and L segments were identical. Moreover, the only difference between these vectors consisted in the transgene inserted downstream of the SSP (FIG. 7A), which was apparently key for the viability of these vectors. Both GFP and E7E6 are simple vector cargo and are not involved in the natural PICV viral life cycle, thus neither of them can be required for viral replication. Moreover E7E6 is well tolerated as a transgene in artPICV-(TOM/E7E6) arguing against the possibility that it was not tolerated as a transgene in the PICV vector context. As such, it was hypothesized that the transgene downstream of SSP impacted the function of the SSP itself. While it is known that signal peptide cleavage is a rate-limiting step of protein secretion (Geukens N, et al. (2004) Biochem. Biophys. Res. Commun. 314 (2), 459-467), impaired SSP cleavage and its limited availability for the formation of the tripartite SSP-GP1-GP2 mature glycoprotein complex would have required the transgene downstream of SSP to affect cleavage efficiency. Contrary to this hypothesis, eukaryotic signal peptide cleavage can be determined by amino acid residues inside the signal peptide itself, without clear impact of the amino acid sequence downstream of the cleavage site.

[0523] In contrast, signal peptidase cleavage in prokaryotes can be influenced by the sequence immediately downstream of the cleavage site (Allet B, et al. (1997) Protein Expr Purif, 9:61-68), the so-called “Pro-region”, which extends up to 30 amino acids. Negative or neutral charge is preferable in the Pro-region and the first six amino acids are particularly important (Owji H, et al. (2018) Eur J Cell Biol 97(6):422-441). In contrast, these amino acid positions are generally assumed to be of limited or no influence on eukaryotic signal peptide cleavage efficiency and resulting protein secretion (Owji H, et al. (2018) Eur J Cell Biol 97(6):422-441). The reason for this presumed difference between prokaryotes and eukaryotes is that in prokaryotes a negatively charged protein region downstream of the signal peptidase cleavage site is thought responsible for loop formation with the positively charged N-terminal region of the signal peptide, thereby compensating the electrochemical potential of the bacterial inner membrane. In contrast, positive charge is, supposedly, readily tolerated downstream of the cleavage site of eukaryotic signal peptides, owing to their lack of an electrochemical potential in the ER membrane (Low K. O., et al. (2013) Appl. Microbiol. Biotechnol. 97 (9), 3811).

[0524] Nevertheless, when aligning the PICV-GP with the open reading frames (ORFs) that contain the SSP in PICV-Split(58)-(TOM/GFP), PICV-Split59-(TOM/GFP), PICV-Split(58)-(TOM/E7E6) and PICV-Split59-(TOM/E7E6) (FIG. 7B), a tentative pattern was observed in the stretch of amino acids comprising position 59 and downstream (FIG. 7C), or the most N-terminal sequence where these ORFs deviate from each other. In PICV-GP, the natural SSP context, this sequence stretch started with four small and hydrophobic, thus neutral, amino acids (GMMI), followed by one acidic amino acid (D) prior to the first basic amino acid (R) at position 64. In PICV-Split59-(TOM/GFP), the vector amongst the four tested above that exhibited the highest fitness, this sequence stretch started with four small, hydrophobic or polar amino acids (GMVS), then followed by a basic amino acid (K at position 63). In the less fit but viable PICV-Split(58)-(TOM/GFP), the stretch of hydrophobic or small polar amino acids in this sequence stretch was shortened to three instead of four (MVS instead of GMVS), with the basic amino acid lysine (K) following already at position 62. Finally, the non-viable PICV-Split(58)-(TOM/E7E6) and PICV-Split59-(TOM/E7E6) had a basic amino acid (H) in position 60 and 61, respectively. Therefore, the hierarchy of vector fitness and viability correlated with the length of a sequence stretch immediately downstream of the signal peptide cleavage site that consisted of neutral, small apolar and acidic amino acids, distancing the first downstream basic amino acid from the cleavage site.

[0525] While this pattern of vector viability was reminiscent of the requirements for efficient prokaryotic signal peptide cleavage there was no direct evidence that these prokaryotic Pro-region characteristics indeed applied to signal peptidase cleavage downstream of the PICV SSP. It was not possible to know after which amino acid SSP cleavage occurred in these several constructs. Thus, potential downstream sequence requirements for efficient SSP cleavage were tested. In brief, additional E7E6-expressing vector constructs were generated, wherein additional PICV-GP-derived sequence, serving as a “buffer peptide,” were placed between the supposed 59Aa-long PICV signal peptide and the E7E6 transgene in PICV-Split59-(TOM/E7E6). Specifically, the fragment of PICV-GP N-terminal sequence that precedes E7E76 in the vector was extended from 59 in PICV-Split(59)-(TOM/E7E6) to either 66, 81 or 113 amino acids (buffer peptides of 7, 22 or 54 amino acids in length, respectively, when assuming a 59 amino acid-long signal peptide), yielding PICV-Split(66)-(TOM/E7E6), PICV-Split(81)-(TOM/E7E6) and PICV-Split(113)-(TOM/E7E6), respectively (FIGS. 8A, 8C, 8E, and 8G). Additionally, it was hypothesized that amino acid 59 of PICV-GP can be either G, as in the constructs tested above, or S (Zhang et al. (1999) Am J Trop Med Hyg.; 61(2):220-5.). Hence, additional vector constructs analogous to the above were generated, wherein the glycine at position 59 of SSP was substituted for a serine (PICV-Split(59S)-(TOM/E7E6), PICV-Split(66S)-(TOM/E7E6), PICV-Split(81S)-(TOM/E7E6) and PICV-Split(113S)-(TOM/E7E6) (refer to “SSP-59S variants”; FIGS. 8B, 8D, 8F, and 8H).

[0526] Transfection experiments to rescue the above vectors from cDNA were performed as outlined for the analogous experiment in FIGS. 5A, 5B and 6D. 3T3 titers and 293T-GP titers were determined seven and nine days after transfection. Similarly to the results shown in FIG. 6D, PICV-Split(59)-(TOM/E7E6) did not form replication-competent vector particles that formed infectious foci on 3T3 cells (FIG. 8A). Exchanging Aa59 of the SSP for a serine in construct PICV-Split(59S)-(TOM/E7E6) did not result in replication-competent vector formation either (FIG. 8B). Both transfections yielded, however, substantial titers of replication-deficient vector particles (293T-GP titer) attesting to the efficiency of the rescue procedure. In striking contrast, PICV-Split(66)-(TOM/E7E6), PICV-Split(81)-(TOM/E7E6) and PICV-Split(113)-(TOM/E7E6) as well as the corresponding SSP-59S variants consistently yielded replication-competent vector particles (FIGS. 8C-8H), with only minor differences in peak titers.

[0527] To better assess potential differences in the growth behavior of PICV-Split(66S)-(TOM/E7E6), PICV-Split(81S)-(TOM/E7E6) and PICV-Split(113S)-(TOM/E7E6) and their SSP-59S variants, BHK-21 cells were infected at MOI of 0.001 or 0.01 and 3T3 titers in supernatant were determined over time (FIGS. 9 and 10). Comparing PICV-Split(66)-(TOM/E7E6), PICV-Split(81)-(TOM/E7E6) and PICV-Split(113)-(TOM/E7E6) with their respective SSP-59S variant did not reveal a consistent advantage of vectors expressing either a serine of glycine at position 59 of the SSP (FIGS. 9A-9F). Neither did the direct comparison of vectors with 66, 81 or 113 Aa of N-terminal PICV-GP sequence preceding E7E6 evidence a clear hierarchy in vector growth, neither at MOI of 0.001 nor of 0.01, and independently of SSP position 59 being either serine or glycine (FIGS. 10A-10D). These findings suggested that the N-terminal 66 amino acids of PICV-GP contained the minimal sequence information that allowed efficient SSP functioning when fused downstream to an E7E6 transgene and expressed in the context of a PICV-Split vector.

[0528] In order to extend these findings to other transgenes, PICV-Split vectors encoding the melanoma antigen Trp2 instead of E7E6 were generated (FIGS. 19A-19C). For this, it was taken into account that the Trp2 protein is naturally inserted into the endoplasmic reticulum (ER) of eukaryotic cells, thus entering the secretory pathway. In designing PICV-Split(66)-(TOM/Trp2), PICV-Split(81)-(TOM/Trp2) and PICV-Split(113)-(TOM/Trp2) vectors (FIGS. 19A-19C), the natural N-terminal signal sequence of Trp2 was substituted with the 59 Aa-long SSP of PICV. Additionally and analogous to the design of the above E7E6-expressing vectors (refer to FIGS. 8C-8H), the SSP and the Trp2 open reading frame (devoid of its own signal peptide; Trp2-delSP) were separated by in-frame “buffer peptide” coding sequence corresponding to either Aa 60-66, Aa 60-81 or Aa 60-113 of PICV-GP, resulting in one in-frame fusion protein (SSP-buffer peptide-Trp2-delSP). A construct devoid of an in-frame “buffer peptide”, PICV-Split(59)-(TOM/Trp2), was also generated (FIG. 19D). Transfection experiments were performed to rescue the above vectors from cDNA as outlined for the analogous experiment in FIGS. 5A-5B, FIG. 6D and FIGS. 8A-8H. 3T3 titers and 293T-GP titers were determined six days after transfection. All transfections yielded substantial titers of replication-deficient vector particles (293T-GP titer) attesting to the efficiency of the rescue procedure. In further analogy to their E7E6-expressing counterparts, PICV-Split(66)-(TOM/Trp2), PICV-Split(81)-(TOM/Trp2) and PICV-Split(113)-(TOM/Trp2) also consistently yielded replication-competent vector particles (FIGS. 11A-11C), with only minor differences in titers. In contrast to the E7E6-expressing set of vectors, however, PICV-Split(59)-(TOM/Trp2) also reached a substantial infectious titer despite its lack of a “buffer peptide” (FIG. 19D). Accordingly, PICV-Split(66)-(TOM/Trp2), PICV-Split(81)-(TOM/Trp2), PICV-Split(113)-(TOM/Trp2) and PICV-Split(59)-(TOM/Trp2) grew with similar kinetics and reached comparable peak titers when passaged on BHK-21 cells (MOI=0.01; FIGS. 20A-20E).

[0529] Consequently, the SSP(Aa1-59)-Trp2delSP sequence was included in the alignment as presented in FIG. 7 (FIGS. 21A-21C), to compare it to PICV-GP and to the open reading frames (ORFs) that contain the SSP in PICV-Split(58)-(TOM/GFP), PICV-Split59-(TOM/GFP), PICV-Split(58)-(TOM/E7E6) and PICV-Split59-(TOM/E7E6) (FIGS. 7B-7C). The SSP(Aa1-59)-Trp2delSP sequence resembled the one of PICV-Split59-(TOM/GFP), the vector amongst the other four recombinant constructs that exhibited the highest fitness: amino acids 60-62 of SSP(Aa1-59)-Trp2delSP, which follow immediately after the putative cleavage site at aa59, are devoid of any basic amino acid, with an arginine (R) following only at position 63. In PICV-GP the first basic amino acid, also an arginine, is found at position 64 and thus is only slightly further distanced from the putative cleavage site than in SSP(Aa1-59)-Trp2delSP of PICV-Split59-(TOM/E7E6) and in SSP(Aa1-59)-GFP expressed from PICV-Split59-(TOM/GFP). Therefore, the hierarchy of vector fitness and viability correlated with a minimal length of a sequence stretch immediately downstream of the signal peptide cleavage site that distanced the first downstream basic amino acid from the cleavage site.

[0530] To directly test whether the sequence immediately downstream of the putative signal peptide cleavage site impacts vector growth properties, amino acid positions 60 and 61 of the SSP(Aa1-66)-E7E6 in PICV-Split66-(TOM/E7E6) were permutated, to either aspartate (DD variant), glutamate (EE variant), glycine (GG variant), leucine (LL variant), histidine (HH variant) or lysine (KK variant) (FIG. 22A). In the wildtype (WT) viral glycoprotein-derived “buffer peptide” sequence these amino acid residues consist of two methionines (MM, WT). The corresponding vectors were rescued from cDNA as described above (see also schematic overview in FIG. 12 and FIG. 4). Subsequently, BHK-21 cells were infected with either one of these vectors at MOI=0.01 and infectious replication-competent vector titers in the supernatant were assessed 24 hours later by immunofocus assay on 3T3 cells (FIG. 22B). Vector titers were highly consistent between the duplicate samples of each vector tested but differed between vector constructs by up to ˜10-fold. While several variants (DD, EE, GG, HH) reached titers that were comparable to or higher than the WT version, the LL variant exhibited a clear growth advantage over WT and the KK variant reached only comparable lower titers. Altogether these findings indicated that the amino acid sequence downstream of the signal peptide cleavage site, in the present example the sequence of the buffer peptide, is critical for vector growth.

[0531] Next, experiments were performed to determine if the insertion of a buffer peptide may also improve the growth of Split vectors that are based on other New World arenaviruses than PICV. As such, Tacaribe virus- (TCRV-) based Split vectors were generated. The TCRV glycoprotein signal peptide length was predicted by the PrediSi (Prediction of SIgnalpeptides) website (from the Technical University of Braunschweig) to consist in the first 58 amino acids of the glycoprotein ORF. TCRV-Split58-(TOM/E7E6), TCRV-Split66-(TOM/E7E6) and TCRV-Split8l-(TOM/E7E6), carrying on their respective S1 segments an SSP-E7E6 ORF that either lacks a buffer peptide (TCRV-Split58-(TOM/E7E6)) or that contain buffer peptides of different lengths (TCRV-Split66-(TOM/E7E6) and TCRV-Split8l-(TOM/E7E6)) were generated (FIGS. 23A-23C). BHK-21 cells were infected with either one of these vectors at multiplicity of infection of 0.01, and infectious titers in the supernatant were determined over time. The buffer peptide-containing TCRV-Split8l-(TOM/E7E6) vector reached higher titers than TCRV-Split66-(TOM/E7E6), and the latter virus' titers over time were higher than those of TCRV-Split58-(TOM/E7E6) lacking a buffer peptide (FIG. 23D).

[0532] Similar studies were performed on Tamiami virus- (TAMV-) based Split vectors. The TAMV glycoprotein signal peptide length was predicted by the PrediSi (Prediction of SIgnalpeptides) website (from the Technical University of Braunschweig) to consist in the first 58 amino acids of the glycoprotein ORF. TAMV-Split58-(GFP/GFP), TAMV-Split66-(GFP/GFP) and TAMV-Split8l-(GFP/GFP), carrying on their respective S1 segments an SSP-E7E6 ORF that either lacks a buffer peptide (TAMV-Split58-(GFP/GFP)) or that contain buffer peptides of different lengths (TAMV-Split66-(GFP/GFP) and TAMV-Split8l-(GFP/GFP)) were generated (FIGS. 23E-23G). BHK-21 cells were infected with either one of these vectors at multiplicity of infection of 0.001 and infectious titers in the supernatant were determined over time. It was found that the buffer peptide-containing TAMV-Split8l-(GFP/GFP) and TAMV-Split66-(GFP/GFP) vectors reached higher peak (e.g., slightly higher) titers than TAMV-Split58-(GFP/GFP), which lacks a buffer peptide (FIG. 23H).

[0533] Next, PICV- and LCMV-based Split vectors were tested to determine if they can be efficiently combined in heterologous prime-boost immunization regimens. C57BL/6 mice were primed with LCMV-Split-(GFP/E7E6) or artLCMV-(GFP/E7E6) and 115 days later were boosted with PICV-Split66-(TOM/E7E6) or artPICV-(TOM/E7E6), respectively (FIGS. 24A-24C). E6 epitope- and E7 epitope-specific CD8 T cell responses in blood were followed over time (FIGS. 24B-24C). The animals immunized twice with Split-based vectors exhibited significantly higher E6- and E7-specific CD8 T cell frequencies than controls immunized with artARENA-based vectors. This difference was particularly pronounced for the subdominant E6 specificity.

[0534] In a complementary experiment, animals were primed with PICV-based vectors followed by LCMV vector-based boost. PICV-Split66-(TOM/E7E6), PICV-Split8l-(TOM/E7E6) or artPICV-(TOM/E7E6) were used as prime on day 0 and LCMV-Split-(GFP/E7E6) or artLCMV-(GFP/E7E6) as a boost on day 28 (FIG. 25A) in combinations as outlined in FIGS. 25B-25C. E7-specific CD8 T cell frequencies in blood of Split-vaccinated mice were higher after prime than in artLCMV-vaccinated mice, but these differences became rather minor after heterologous boost and there was not appreciable difference in immunogenicity between PICV-Split66-(TOM/E7E6) and PICV-Split81-(TOM/E7E6). E6- and E7-specific CD8 T cell frequencies were analyzed in spleen on day 148 of the experiment (day 120 after boost) by intracellular cytokine staining after restimulation with overlapping peptide sets spanning the entire E6 and E7 proteins, respectively. Animals undergoing Split-based vaccination haboured ˜15-20-fold higher E6-specific IFN-g-, TNF-α- and IL-2-secreting CD8 T cell frequencies. In contrast, E7-specific responses were comparable between the different immunization regimens, and there was no clear difference between the responses elicited by PICV-Split66-(TOM/E7E6) and PICV-Split8l-(TOM/E7E6).

[0535] Next, the Pichinde virus glycoprotein signal peptide length was experimentally determined to further consolidate the buffer peptide concept for Split-PICV vectors. ArtPICV virions were purified and concentrated by ultracentrifugation. The virions were then lysed in a buffer containing 100 mM Tris pH=8.5/1% Sodium Deoxycholate/10 mM TCEP by heating to 950 C for 10 min and by twenty cycles of sonication (30 seconds on, 30 seconds off per cycle) on a Bioruptor system (Dianode). Proteins were alkylated using 15 mM chloroacetamide at 370 C for 30 min and further digested using sequencing-grade chymotrypsin (1/50 w/w, Roche) at 37° C. for 12 hours. To enhance digestion efficiency, 10 mM CaCl₂) was added during digestion. After digestion, the samples were acidified using TFA (final 1%). Peptide desalting was performed using iST cartridges (PreOmics, Germany) following the manufacture's instructions. After drying the samples under vacuum, peptides were stored at −20° C. until further use.

[0536] Peptides were fractionated by high-pH reversed phase separation using a XBridge Peptide BEH C18 column (3.5 μm, 130 Å, 1 mm×150 mm, Waters) on an Agilent 1260 Infinity HPLC system. Peptides (100 pg) were loaded in buffer A (20 mM ammonium formate in water, pH 10) and eluted using a two-step linear gradient from 2% to 10% in 5 minutes and then to 50% buffer B (20 mM ammonium formate in 90% acetonitrile, pH 10) over 55 minutes at a flow rate of 42 μl/min. Elution of peptides was monitored with a UV detector (215 nm, 254 nm). A total of 36 fractions were collected and pooled into 12 fractions using a post-concatenation strategy as previously described (Wang et al. Proteomics 2011 May; 11(10):2019-26). Peptides were dried under vacuum until further use. For mass spectrometry analysis, dried peptides were resuspended in 0.1% aqueous formic acid and subjected to LC-MS/MS analysis using an Orbitrap Eclipse Mass Spectrometer fitted with an Ultimate 3000 nano-LC (both Thermo Fisher Scientific) and a custom-made column heater set to 60° C. Peptides were resolved using a RP-HPLC column (75 m×30 cm) packed in-house with C18 resin (ReproSil-Pur C18-AQ, 1.9 m resin; Dr. Maisch GmbH) at a flow rate of 0.3 Lmin-1. The following gradient was used for peptide separation: from 2% B to 12% B over 5 min to 35% B over 45 min to 50% B over 10 min to 95% B over 2 min followed by 18 min at 95% B. Buffer A was composed of 0.1% formic acid in water and buffer B was composed of 80% acetonitrile, 0.1% formic acid in water.

[0537] The mass spectrometer was operated in data-independent acquisition (DIA) mode with a total cycle time of approximately 3 see (1 MS1 scan followed by 70 DIA scans). For MS1, 1.2E6 ions were accumulated in the Orbitrap over a maximum time of 45 ms and scanned at a resolution of 120,000 FWHM (at 200 m/z) over a range of 350-1400 m/z. DIA scans were acquired at a target setting of 1.2E6 ions, maximum injection time of 22 ms and a resolution of 15,000 FWHM (at 200 m/z) over a range of 386-1016 m/z. The normalized collision energy was set to 28%, the isolation window was set to 9 m/z and window overlap was set to 1 m/z.

[0538] For protein identification the acquired raw-files were analysed by directDIA using the PULSAR search engine (SpectroNaut version 15.7.220308.50606, Biognosys AG) against the UniProt Human and Pichinde Virus database containing commonly observed contaminants. Search criteria included: semi-specific chymotryptic cleavage, permission for 2 missed cleavages, carbamidomethylation (C) was set as fixed modification and oxidation (M) and Deamidation (N) were set as a variable modifications. A Protein Qvalue Cutoff of 0.01 was used to filter the protein identification results.

[0539] As a result of this workstream, two semi-specific chymotryptic peptides corresponding to the C-terminus of the PICV-GP signal peptide were identified (FIGS. 26A-26B): F.LILAGRSC[Carbamidomethyl]DG.M and L.ILAGRSC[Carbamidomethyl]DG.M (LILAGRSC[Carbamidomethyl]DG and ILAGRSC[Carbamidomethyl]DG with flanking aa residues from PICV GPC separated by a dot). Chymotrypsin cleaves after large hydrophobic amino acids (tyrosine, tryptophane and phenylalanine; single letter codes Y, W, F, respectively) and after leucine (single letter code L) but virtually never after glycine (single letter code G). Accordingly, only the N-terminus of the identified peptides can be explained by chymotrypsin cleavage after F and L, respectively, but the same cannot apply for their C-terminus consisting of a G residue. The identical C-terminal glycine residue of these two independently identified peptides (G59 of the PICV GPC sequence, FIG. 26C) must, therefore, correspond to the naturally processed C-terminus of the PICV glycoprotein signal peptide as it is found in the infectious virion.

[0540] Next, PICV-Split(66S)-(TOM/E7E6) and/or PICV-Split(81S)-(TOM/E7E6) were tested to determine if they could be used to induce an immune response against the E7E6 transgene. The immune response was compared to the responses to those elicited by artPICV-(TOM/E7E6) (FIGS. 11A-C). It was observed that mice immunized with PICV-Split(66S)-(TOM/E7E6) and PICV-Split(81S)-(TOM/E7E6) exhibited substantial E7-dextramer-binding CD8+ T cell frequencies in peripheral blood, eight days after intravenous immunization at a dose of 10E5 replication-competent focus forming units (FFU) (FIG. 11D). These responses exceeded those of artPICV-(TOM/E7E6)-immunized mice ˜7-fold and ˜5-fold, respectively. The responses to the nucleoprotein backbone-derived epitope NP38 were, however, comparable between the three groups of mice (FIG. 11E). The relative immunodominance of E7-directed responses was calculated by dividing the frequency of E7-specific responses by the frequency of NP38-specific responses. It was shown that E7-specific responses in PICV-Split(66S)-(TOM/E7E6) and PICV-Split(81S)-(TOM/E7E6) immunized mice were approximately 10-fold more immunodominant than in artPICV-(TOM/E7E6)-immunized mice.

### 6.2 SplitC-LCMV

[0541] Many transgenes that are being or should be encoded into the SplitC platform harbor an internal signal peptide sequence that can potentially interfere with the cleavage efficiency of the arenavirus signal peptide (SSP) when encoded on the respective S1 segment. To investigate a potential interference, various transgenes that carry a signal peptide at their N-terminus were selected and either the full-length version or a version lacking the respective native signal peptide (_delSP) was encoded on the S1 segment. LCMV-Split58-vectors encoding TRP2, PSA and GP70 were generated as representative examples.

[0542] To generate respective vectors, BHK-21 cells stably expressing the lymphocytic choriomeningitis virus (LCMV) glycoprotein (BHK-23 cells; Flatz L, et al. Nat Med 2010; 16, 339-345) were co-transfected with plasmids (Schematic overview FIG. 12 and FIG. 4): i) a polymerase-I-based expression plasmid encoding for a wildtype LCMV L segment (pol-I-L), ii) polymerase-I-based expression plasmids encoding for the respective LCMV vectors' S1 and S2 segments (Pol-I-S1, Pol-I-S2) including the respective transgenes (i.e., heterologous non-arenaviral polypeptides) and, iii) polymerase-II-driven expression plasmids for the LCMV trans-acting factors L and NP (pC-L, pC-NP). Three days after transfection, cells were propagated from 6-well plates into T75 cell culture flask. The vector containing supernatant was harvested 6 days post transfection and infectious titers were determined by Focus Forming Unit assay (FFU determined on 293T-GP cells; and RCV FFU determined on adherent HEK293 cells).

[0543] It was observed that the rescue efficiency was very similar for all constructs (100%). However, there was a trend for higher vector titers when the native signal peptide of the transgene encoded on the S1 segment of the respective vector was deleted (i.e., LCMV-Split58-(TRP2/TRP2_delSP), LCMV-Split58-(PSA/PSA_delSP), LCMV-Split58-(GP70/GP70_delSP)) compared to vectors that encoded the native version of the respective heterologous non-arenaviral polypeptides on both S segments (i.e., LCMV-Split58-(TRP2/TRP2), LCMV-Split58-(PSA/PSA), LCMV-Split58-(GP70/GP70)) (FIGS. 13A-13B and FIGS. 15A-15B).

[0544] The rescued vector material was further passaged on HEK293 suspension cells, using a MOI of 0.01 for infection. Vector containing cell culture supernatant was harvested 4 days post infection and subjected to titration by FFU and RCV FFU assays. Interestingly, a trend was also observed towards higher titers for vector constructs encoding transgenes devoid of their native signal peptide on the S1 segment (FIG. 13B, FIG. 15B).

[0545] Next, the integrity of the encoded TRP2 transgene was investigated by RT-PCR analysis. Vector samples of passages 1 and 2 were subjected to RNA extraction, reverse transcription, and subsequent PCR analysis. PCR primer were selected to flank the transgenes, such that the size of the transgene and potential deletions therein could be analyzed by gel electrophoresis. Interestingly, it was observed that the TRP2 transgene encoded on the S1 segment (Pol-I-S1) revealed significant transgene instability (FIG. 13C) from passage 1 onwards (evident in accessory “TRP2-GP” amplicons of shorter than expected length, FIG. 13C), whereas 2 out of 3 replicates of the vector construct encoding TRP2_delSP (i.e., the TRP2 variant in which the TRP2 signal peptide has been removed, “TRP2_delSP-GP” amplicons in FIG. 13C) on the S1 segment showed transgene stability until passage 2 (FIG. 13C).

[0546] To investigate the influence of the transgene internal signal sequence on the vector rescue performance and stability of the encoded TRP2 transgene, sequence analyses of the PCR products from two different passage 1 vector samples were performed using Sanger consensus sequencing (FIGS. 14A-14B). Three mutations were identified, which were located within the TRP2-internal signal peptide or in close proximity to the TRP2-internal signal peptide cleavage site at amino acid position 23/24 of TRP2 (FIG. 14A). Of note, one mutation (I17T) was detected in both independently rescued vector samples analyzed. Upon analysis of these mutated sequences using the signal peptide analysis tool SignalP we found that the combination of two of the above mutations (I17T plus F25L or I17T plus L8P) is predicted to result in a reduced cleavage probability of 74% and 67%, respectively (FIG. 14B).

[0547] The results from this example point to an increased rescue probability/growth potential of vectors encoding transgenes that have a lower cleavage probability for their internal signal peptide, possibly by favoring cleavage of the arenavirus signal peptide, and thus promoting correct assembly of all three parts of the arenaviral glycoprotein (GP1, GP2 and SSP). If this hypothesis is true, the identification of individual signal peptide mutations could potentially enable modification of transgenes of interest (that encode for an internal signal peptide) in a targeted way; thus, potentially obviating the necessity to delete the whole signal peptide from the antigen.

### 6.3 SplitC-PICV

[0548] When the Split-C vector design was applied to PICV, analogous to what is described above for LCMV-Split58 (refer to example in Section 6.2), it was observed that vectors expressing E7E6 and Trp2 as transgenes on their S1 and S2 segments, respectively, could not be rescued by co-transfection of BHK-21 cells stably expressing the LCMV glycoprotein (BHK-23 cells) (FIG. 16). While bi-segmented, non-replicating vector particles were detectable, the generation of replication competent vectors was not possible (FIG. 16). Thus, it was hypothesized that the length of the PICV glycoprotein signal peptide may not be 58 amino acids as reported for LCMV, Lassa virus and Junin virus (Agnihothram, S S, et al. (2006) J Virol 80, 5189-5198; Eichler R, et al. (2003) EMBO Rep 4, 1084-1088; Schrempf S, et al. (2007) J Virol 81, 12515-12524). As such, plasmids were re-designed to encode a signal peptide of either 58 Aa or 59 Aa in length, the latter as predicted by the PrediSi (Prediction of SIgnalpeptides) website (from the Technical University of Braunschweig) (FIG. 2). For this example, the following vectors were generated: (i) PICV-Split vectors with a 58Aa-long PICV signal peptide (PICV-Split58 vectors), (ii) PICV-Split vectors with a 59Aa-long PICV signal peptide (PICV-Split59 vectors), and/or (iii) replication-competent, tri-segmented PICV vectors where the PICV-GP was expressed as one open reading frame (ORF) under control of the genomic 3′ UTR promoter of the S1 segment (artPICV vectors). The respective vector constructs encoded the following heterologous non-arenaviral polypeptides on their respective S1 and/or S2 segments: (a) E7E6, (b) TRP2, or (c) TRP2 devoid of its native N-terminal signal peptide (TRP2_delSP). Upon co-transfection of BHK-23 cells with the respective plasmids it was found that replication competent PICV-Split59 but no PICV-Split58 vectors could be rescued. artPICV vectors encoding the above transgenes in all possible combinations on their S1 and S2 segments were recovered in all four independent transfection cultures (100%). In contrast, the recovery rate of replication-competent PICV-Split59 vectors ranged from 16.6% 37.5% only. Furthermore, it was observed that only PICV-Split59 vectors encoding TRP2_delSP (but not full-length TRP2) on their S1 segment yielded replication competent vectors (FIG. 16, compare PICV-Split59-(TRP2/TRP2_delSP) and PICV-Split59-(TRP2/TRP2)).

[0549] All successful vector rescues in the above experiment yielded substantial replication-competent titers (FIG. 17A). This finding was corroborated and extended when the viable vectors were passaged in HEK293 suspension cells (FIG. 17B).

### 7. EQUIVALENTS

[0550] The viruses, nucleic acids, methods, host cells, and compositions disclosed herein are not to be limited in scope by the specific embodiments described herein. Indeed, various modifications of the viruses, nucleic acids, methods, host cells, and compositions in addition to those described will become apparent to those skilled in the art from the foregoing description and accompanying figures. Such modifications are intended to fall within the scope of the appended claims.

[0551] Various publications, patents and patent applications are cited herein, the disclosures of which are incorporated by reference in their entireties.

TABLE 5
Assession number for specific arenaviruses

| | | GenBank Accession | Ref. Seq. |
|---|---|---|---|
| Virus name | Isolate | number | number |
| Allpahuayo virus | CHLP-2472 | L: AY216502; | L: NC_010249; |
| | | S: AY012687 | S: NC_010253 |
| Alxa virus | RtDs-AreV-IM2014 | L: KY432892; | |
| | | S: KY432893 | |
| Junín virus | XJ13 | L: AY358022; | L: NC_005080; |
| | | S: AY358023 | S: NC_005081 |
| Bear Canyon virus | AV A0070039 | L: AY924390; | L: NC_010255; |
| | | S: AY924391 | S: NC_010256 |
| Sabiá virus | SPH114202 | L: AY358026; | L: NC_006313; |
| | | S: U41071 | S: NC_006317 |
| Pichindé virus | AN3739 | L: AF427517; | L: NC_006439; |
| | | S: K02734 | S: NC_006447 |
| Chapare virus | 810419 | L: EU260464; | L: NC_010563; |
| | | S: EU260463 | S: NC_010562 |
| Lìjiāng virus | KS4 | L: MF414201; | |
| | | S: MF414202 | |
| Cupixi virus | BeAn 119303 | L: AY216519; | L: NC_010252; |
| | | S: AF512832 | S: NC_010254 |
| Flexal virus | BeAn 293022 | L: EU627611; | L: NC_010759; |
| | | S: AF512831 | S: NC_010757 |
| Gairo virus | TZ-27421 | L: KJ855307; | L: NC_026247; |
| | | S: KJ855308 | S: NC_026246 |
| Guanarito virus | INH-95551 | L: AY358024; | L: NC_005082; |
| | | S: AY129247 | S: NC_005077 |
| Ippy virus | Dak An B 188d | L: DQ328878; | L: NC_007906; |
| | | S: DQ328877 | S: NC_007905 |
| Lassa virus | Josiah | L: U73034; | L: NC_004297; |
| | | S: J04324 | S: NC_004296 |
| Latino virus | MARU 10924 | L: EU627612; | L: NC_010760; |
| | | S: AF512830 | S: NC_010758 |
| Loei River virus | R5074 | L: KC669693; | L: NC_038365; |
| | | S: KC669698 | S: NC_038364 |
| Lujo virus | R4356 | L: FJ952385; | L: NC_012777; |
| | | S: FJ952384 | S: NC_012776 |
| Luna virus | LSK-1 | L: AB586645; | L: NC_016153; |
| | | S: AB586644 | S: NC_016152 |
| Luli virus | SLW-1 | L: AB972431; | |
| | | S: AB972430 | |
| Lunk virus | NKS-1 | L: AB693151; | L: NC_018711; |
| | | S: AB693150 | S: NC_018710 |
| lymphocytic | Armstrong 53b | L: AY847351; | L: NC_004291; |
| choriomeningitis | | S: AY847350 | S: NC_004294 |
| virus | | | |
| Machupo virus | Carvallo | L: AY358021; | L: NC_005079; |
| | | S: AY129248 | S: NC_005078 |
| Mariental virus | N27 MrMi.n9 | L: KP867641; | L: NC_027136; |
| | | S: KM272987 | S: NC_027134 |
| Merino Walk virus | Merino Walk | L: GU078661; | L: NC_023763; |
| | | S: GU078660 | S: NC_023764 |
| mobala virus | Acar 3080 | L: DQ328876; | L: NC_007904; |
| | | S: AY342390 | S: NC_007903 |
| Mopeia virus | AN20410 | L: AY772169; | L: NC_006574; |
| | | S: AY772170 | S: NC_006575 |
| Morogoro virus | 3017/2004 | L: EU914104; | |
| | | S: EU914103 | |
| Okahandja virus | N73 OkhMi.n4 | L: KP867642; | L: NC_027137; |
| | | S: KM272988 | S: NC_027135 |
| Oliveros virus | 3229 | L: AY216514; | L: NC_010250; |
| | | S: U34248 | S: NC_010248 |
| Paraná virus | 12056 | L: EU627613; | L: NC_010761; |
| | | S: AF485261 | S: NC_010756 |
| Pirital virus | VAV-488 | L: AY494081; | L: NC_005897; |
| | | S: AF485262 | S: NC_005894 |
| Aporé virus | LBCE 12071 | L: MF317491; | L: NC_040763; |
| | | S: MF317490 | S: NC_040762 |
| Ryukyu virus | YN2013 | L: KM020190; | L: NC_039010; |
| | | S: KM020191 | S: NC_039009 |
| Amaparí virus | BeAn 70563 | L: AY216517; | L: NC_010251; |
| | | S: AF485256 | S: NC_010247 |
| Solwezi virus | 13ZR68 | L: AB972429; | L: NC_038366; |
| | | S: AB972428 | S: NC_038367 |
| souris virus | PREDICT-05775- | L: KP050226; | L: NC_039011; |
| | 5302-5304 | S: KP050227 | S: NC_039012 |
| Tacaribe virus | T.RVL.II 573 | L: J04340; | L: NC_004292; |
| | | S: M20304 | S: NC_004293 |
| Tamiami virus | W10777 | L: AY924393; | L: NC_010702; |
| | | S: AF485263 | S: NC_010701 |
| Wēnzhōu virus | Rn-242 | L: KJ909795; | L: NC_026019; |
| | | S: KJ909794 | S: NC_026018 |
| Whitewater Arroyo | AV 9310135 | L: AY924395; | L: NC_010703; |
| virus | | S: AF228063 | S: NC_010700 |
| Big Brushy Tank | AV D0390174 | L: EU938665; | |
| virus | | S: EF619035 | |
| Catarina virus | AV N0010001 | S: JX237768 | |
| Skinner Tank virus | AV D1000090 | L: EU938659; | |
| | | S: EU123328 | |
| Tonto Creek virus | AV D0390060 | L: EU938663; | |
| | | S: EF619034 | |
| Xapuri virus | LBCE 19881 | S: MG976578; | |
| | | L: MG976577 | |

S indicates the GenBank accession number or the sequence number of the S segment;
L indicates GenBank accession number or the sequence number of the L segment

The application's sequence listing, which the Patent Office published only in electronic form, follows.

SEQUENCE LISTING (166 sequences)

SEQ ID NO: 1 - protein, 498 aa, lymphocytic choriomeningitis virus (LCMV)
  Amino acid sequence of glycoprotein precursor in LCMV
MGQIVTMFEALPHIIDEVINIVIIVLIIITSIKAVYNFATCGILALVSFLFLAGRSCGMYGLNGPDIYKGVYQFKSVEFDMSHLNLTMPNACSANNSHHYISMGSSGLELTFTNDSILNHNFCNLTSAFNKKTFDHTLMSIVSSLHLSIRGNSNHKAVSCDFNNGITIQYNLSFSDPQSAISQCRTFRGRVLDMFRTAFGGKYMRSGWGWAGSDGKTTWCSQTSYQYLIIQNRTWENHCRYAGPFGMSRILFAQEKTKFLTRRLAGTFTWTLSDSSGVENPGGYCLTKWMILAAELKCFGNTAVAKCNVNHDEEFCDMLRLIDYNKAALSKFKQDVESALHVFKTTVNSLISDQLLMRNHLRDLMGVPYCNYSKFWYLEHAKTGETSVPKCWLVTNGSYLNETHFSDQIEQEADNMITEMLRKDYIKRQGSTPLALMDLLMFSTSAYLISIFLHLVKIPTHRHIKGGSCPKPHRLTNKGICSCGAFKVPGVKTIWKRR

SEQ ID NO: 2 - protein, 490 aa, Lassa virus
  Amino acid sequence of glycoprotein precursor in Lassa virus
MGQIITFFQEVPHVIEEVMNIVLIALSLLAILKGVYNVATCGIIGLVTFLFLCGRSCSLIYKGSYELQTLELNMETLNMTMPLSCTKNSSHHYIRVGNETGLELTLTNTSIINHKFCNLSDAHKRNLYDHALMSILSTFHLSIPNFNQYEAMSCDFNGGKISVQYNLSHAYAVDAAEHCGTVANGVLQTFMRMAWGGSYIALDSGRGNWDCIMTSYQYLIIQNTTWEDHCQFSRPSPIGYLGLLSQRTRDIYISRRLLGTFTWTLSDSEGNETPGGYCLTRWMLIEAELKCFGNTAVAKCNEKHDEEFCDMLRLFDFNKQAIQRLKSEAQMSIQLINKAVNALINDQLIMKNHLRDMMGIPYCNYSKYWYLNHTSSGRTSLPKCWLVSNGSYLNETHFSDDIEQQADNMITEMLQKEYIDRQGKTPLGLVDLFVFSTSFYLISIFLHLIKIPTHRHIVGKPCPKPHRLNHMGICSCGLYKQPGVPTRWKR

SEQ ID NO: 3 - protein, 508 aa, Pichinde virus
  Amino acid sequence of glycoprotein precursor in Pichinde virus
MGQVVTLIQSIPEVLQEVFNVALIIVSTLCIIKGFVNLMRCGLFQLITFLILAGRSCDGMMIDRRHNLTHVEFNLTRMFDNLPQSCSKNNTHHYYKGPSNTTWGIELTLTNTSIANETTGNFSNIRSLAYGNISNCDKTEEAGHTLKWLLNELHFNVLHVTRHVGARCKTVEGAGVLIQYNLTVGDRGGEVGRHLIASLAQIIGDPKIAWVGKCFNNCSGGSCRLTNCEGGTHYNFLIIQNTTWENHCTYTPMATIRMALQKTAYSSVSRKLLGFFTWDLSDSTGQHVPGGYCLEQWAIVWAGIKCFDNTVMAKCNKDHNEEFCDTMRLFDFNQNAIKTLQLNVENSLNLFKKTINGLISDSLVIRNSLKQLAKIPYCNYTKFWYINDTITGRHSLPQCWLVHNGSYLNETHFKNDWLWESQNLYNEMLIKEYEERQGKTPLALTDICFWSLVFYTITVFLHLVGIPTHRHIIGDGCPKPHRITRNSLCSCGYYKIPKKPYKWVRLGK

SEQ ID NO: 4 - protein, 485 aa, Junin virus
  Amino acid sequence of glycoprotein precursor in Junin virus
MGQFISFMQEIPTFLQEALNIALVAVSLIAIIKGIVNLYKSGLFQFFVFLALAGRSCTEEAFKIGLHTEFQTVSFSMVGLFSNNPHDLPLLCTLNKSHLYIKGGNASFQISFDDIAVLLPQYDVIIQHPADMSWCSKSDDQIWLSQWFMNAVGHDWHLDPPFLCRNRAKTEGFIFQVNTSKTGVNGNYAKKFKTGMHHLYREYPDPCLNGKLCLMKAQPTSWPLQCPLDHVNTLHFLTRGKNIQLPRRSLKAFFSWSLTDSSGKDTPGGYCLEEWMLVAAKMKCFGNTAVAKCNLNHDSEFCDMLRLFDYNKNAIKTLNDETKKQVNLMGQTINALISDNLLMKNKIRELMSVPYCNYTKFWYVNHTLSGQHSLPRCWLIKNNSYLNISDFRNDWILESDFLISEMLSKEYSDRQGKTPLTLVDICIWSTVFFTASLFLHLVGIPSHRHIRGEACPLPHRLNSLGGCRCGKYPNLKKPTVWRRGH

SEQ ID NO: 5 - protein, 518 aa, Oliveros virus
  Amino acid sequence of glycoprotein precursor in Oliveros virus
MGQVIGFFQSLPNIINEALNIALICVALIAILKGIVNIWKSGLIQLFIFLILAGRSCSHTFQIGRNHEFQSITLNFTQFLGYAPSSCSVNNTHHYFRGPGNVSWGIELTLTNNSVINASNSLKVFTNIHHNITNCVQNIDEQDHLMKWLIETMHLQIMKPGKRLPPILCEKDKGLLIEYNLTNIASREEKHSEYWSQLLYGLSKLLGSSKSLWFDYCQRADCMMQEHSSHLKCNYSECSGHTTFKYLILQNTTWENHCEFNHLNTIHLLMSSTGQSFITRRLQAFLTWTLSDATGNDLPGGYCLEQWAIVWAGIKCFGNTAVAKCNQNHDSEFCDMLRLFDYNRNAIKSLNDQSQSRLNLLTNTINSLISDNLLMKNKLAEIMNIPYCNYTKFWYINDTRTGRHTLPQCWLISNGSYLNETKFRTQWLSESNALYTEMLTEDYDKRQGSTPLSLVDLCFWSTLFYVTTLFAHLVGFPTHRHILDGPCPKPHRLTKKGICSCGHFGIPGKPVRWVKRSR

SEQ ID NO: 6 - protein, 485 aa, Tamiami virus
  Amino acid sequence of glycoprotein precursor in Tamiami virus
MGQLISFFGEIPTILQEALNIALIAVSIIATIKGVVNVWKSGLIQLLMFVMLAGRSCSVQIGHHLELEHIILNSSSILPFTPTLCKLNKTYFLVRGPFQAHWGVDLAIGSTTVAVENATKTYTLKSKNFTGCFEGNPDPDSAALLVTWLFNSLHHDYKNDPSILCERVSGENSFRFQINISEPEYCEKILSRMANLFGSFENYCLNNRHIKKLIIIRNLTWSQQCHENHMSAMQLITSNIHTQVVRARRILSFFTWSLSDAVGNDMPGGYCLEKWMLIASQLKCFGNTAVAKCNLNHDSEFCDMLRLFDFNRKAIETLQNKTRSQLNIAINAINSLISDNLLMKNRVKELMDIPFCNYTKFWYVNHTKLNHHSLPRCWLVKNGSYLNESEFRNDWLLESDHLISEILSREYEERQGRTPLSLVDVCFWSTLFYTASIFLHLIRIPTHRHIVGEGCPKPHRLRADSTCACGLYKQKRRPLKWVRSN

SEQ ID NO: 7 - protein, 558 aa, lymphocytic choriomeningitis virus (LCMV)
  Amino acid sequence of nucleoprotein in LCMV
MSLSKEVKSFQWTQALRRELQSFTSDVKAAVIKDATNLLNGLDFSEVSNVQRIMRKEKRDDKDLQRLRSLNQTVHSLVDLKSTSKKNVLKVGRLSAEELMSLAADLEKLKAKIMRSERPQASGVYMGNLTTQQLDQRSQILQIVGMRKPQQGASGVVRVWDVKDSSLLNNQFGTMPSLTMACMAKQSQTPLNDVVQALTDLGLLYTVKYPNLNDLERLKDKHPVLGVITEQQSSINISGYNFSLGAAVKAGAALLDGGNMLESILIKPSNSEDLLKAVLGAKRKLNMFVSDQVGDRNPYENILYKVCLSGEGWPYIACRTSIVGRAWENTTIDLTSEKPAVNSPRPAPGAAGPPQVGLSYSQTMLLKDLMGGIDPNAPTWIDIEGRFNDPVEIAIFQPQNGQFIHFYREPVDQKQFKQDSKYSHGMDLADLFNAQPGLTSSVIGALPQGMVLSCQGSDDIRKLLDSQNRKDIKLIDVEMTREASREYEDKVWDKYGWLCKMHTGIVRDKKKKEITPHCALMDCIIFESASKARLPDLKTVHNILPHDLIFRGPNVVTL

SEQ ID NO: 8 - protein, 569 aa, Lassa virus
  Amino acid sequence of nucleoprotein in Lassa virus
MSNSKEVKSFLWTQSLRRELSGYCSNIKLQVVKDAQALLHGLDFSEVSNVQRLMRKQKRDDGDLKRLRDLNQAVNNLVELKSVQQKSILRVGTLTSDDLLTLAADLEKLKSKVTRTERPLSSGVYMGNLSSQQLDQRRALLSMIGMSGGNQNSQPKGDGVVRVWDVKNADLLNNQFGTMPSLTLACLTKQGQVDLNDAVQALTDLGLIYTAKYPNSSDLDRLSQSHPILNMIDTKKSSLNISGYNFSLGAAIKTGACMLDGGNMLETIKVTPQTMDGILKSILKVKRSLGMFISDTPGERNPYENILYKICLSGDGWPYIASRTAIIGRAWENTVVDLESDSKPQKIGSNGSNKSLQSAGFAPGLTYSQLMTLKDSMLQLDPNAKTWIDIEGRPEDPVEVALFQPISGCYIHFFREPTDLKQFKQDAKYSHGIDVTDLFAAQPGLTSAVIEALPRNMVLTCQGSDDIKKLLDSQGRRDIKLIDVSLNKIDSRKFENAVWDQYKDLCHMHTGVVVEKKKKGGKEEITPHCALLDCIMFDAAVSGGLNATVLRAVLPRDMVFRTSSPKVVL

SEQ ID NO: 9 - protein, 561 aa, Pichinde virus
  Amino acid sequence of nucleoprotein in Pichinde virus
MSDNIPSFRWVQSLRRGLSNWTHPVKADVLSDTRALLSALDFHKVAQVQRMMRKDKRTDSDLTKLRDMNKEVDALMNMRSIQRDNVLKVGGLAKEELMELASDLDKLRKKVTRTESLSQPGVYGGNLTNTQLEQRAEILRSMGFANARPTGNRDGVVKIWDIKDNTLLINQFGSMPALTIACMTEQGGEQLNDVVQALSALGLLYTVKFPNMTDLEKLTQQHSALKIISNEPSAINISGYNLSLSAAVKAAACMIDGGNMLETIQVKPSMFSTLIKSLLQIKNREGMFVSTTPGQRNPYENLLYKICLSGDGWPYIGSRSQVQGRAWDNTTVDLDSKPSAIQPPVRNGGSPDLKQIPKEKEDTVVSSIQMLDSKATTWIDIEGTPNDPVEMAIYQPDTGNYIHCYRFPHDEKSFKEQSKYSHGLLLKDLADAQPGLISSIIRHLPQNMVFTAQGSDDIISLFEMHGRRDLKVLDVKLSAEQARTFEDEIWERYNLLCTKHKGLVIKKKKKGAAQTTANPHCALLDTIMFDATVTGWVRDQKPMRCLPIDTLYRNNTDLINL

SEQ ID NO: 10 - protein, 564 aa, Junin virus
  Amino acid sequence of nucleoprotein in Junin virus
MAHSKEVPSFRWTQSLRRGLSQFTQTVKSDVLKDAKLIADSIDFNQVAQVQRALRKTKKGEEDLNKLRDLNKEVDRLMSMRSVQRNTVFKVGDLGRDELMELASDLEKLKNKIRRAETGSQGVYMGNLSQSQLAKRSEILRTLGFQQQGTGGNGVVRIWDVKDPSKLNNQFGSVPALTIACMTVQGGETMNSVIQALTSLGLLYTVKYPNLSDLDRLTQEHDCLQIVTKDESSINISGYNFSLSAAVKAGASILDGGNMLETIRVTPENFSSLIKSTIQVKRREGMFIDEKPGNRNPYENLLYKLCLSGDGWPYIGSRSQITGRSWDNTSIDLTRKPVAGPRQPEKNGQNLRLANLTEIQEAVIREAVGKLDPTNTLWLDIEGPATDPVEMALFQPAGKQYIHCFRKPHDEKGFKNGSRHSHGILMKDIEDAMPGVLSYVIGLLPPDMVVTTQGSDDIRKLFDLHGRRDLKLVDVKLTSEQARQFDQQVWEKYGHLCKYHNGVVVNKKKREKDTPFKLASSEPHCALLDCIMFQSVLDGKLYEEEPTPLLPPSLLFLPKAAYAL

SEQ ID NO: 11 - protein, 558 aa, Oliveros virus
  Amino acid sequence of nucleoprotein in Oliveros virus
MSGASDIPSFRWTQSLRRGLSHYTTQTKGDVLRDAKSLVDGLDFSQVSQVQRVMRKERRSDDDLLKLRDLNKAVDGLMMMRNKQSNVSLKVGGLSKDELMELATDLEKLKRKINTNERSTPGVYQGNLTTAQLDRRSAILRSLGFQSRQGQNNGVVRIWDIKDQKQLINQFGSMPALTIACMSVQGAEQMNDVVQGLTTLGLLYTVKYPNLDDLEKLSAEHTCLQFITREESANNISGYNLSLAAAVKAGACLVDGGNMLETIYVKPDVFADIIKSLLRVKHQERMFVSEKPGMRNPYENILYKICLSGEGWPYIGSRSQITGRAWDNTTIDFSKDVMYGPPPPVKNGGNIRLNPLTDTQEAVIKEAISKLNPDETIWVDIEGPPTDPVELALYQPTTGYYIHCFRLPHDEKGFKNGSKYSHGILLRDIENARSGLLSRILIKLPSKLVLTCQGSDDIKKLMELNGRPDISTIDLSFPTDQARFYESVVWEKFGSLCTKHNGVVLSRKKKGGNSGEPHCALLDCLMFQAAFEGNVPSIEPKPLLPSALVFKSESVVAM

SEQ ID NO: 12 - protein, 565 aa, Tamiami virus
  Amino acid sequence of nucleoprotein in Tamiami virus
MSDQSVPSFRWVQSLRRGLSAWTTPVKADVLNDTRALLSGLDFSKVASVQRMMRREKRDDNDLTNLRDLNKEVDSLMTMRSSQKNMFLKVGSLSKDELMELSSDLNKLKEKVQRSERISGSSGVYQGNLTTTQLTRRSEILQLVGIQRPGLNRRGGVVKIWDIKEPEHSLINQFGSTPAVTISCMAEQGGETLNDVVARPNRSVGYFTQQSFLIWVTWRALSSKHSCLKVITQEESQINISGFNLSLSAAVKAGACLVDGGNMLETIKVEESTFTTIIKTLLEIKSKERMFVDITPGQRNPYENLLYKLCLSGEGWPYIASRSQIKGRAWDNTVIEFDVSPRKPPVPIRNGGSPVLTTLKPEVEEQIKRSIESLSVHDTTWIDIEGPPFDPVEMAIYQPDSLKYIHCYRKPNDVKSFKDQSKYCHGILLKDIEYCSSLALYQPSLRHLPKSMVFTAQGSEDIRRLFDMHGRQDLKIVDVKFTAEQSRVFEELTWKRFEHLCDKHKGIVIKSKKKGTTPASTNAHCALMDCIMFSGVLLGAIPNDKPRRLLPLDILFREPDTTVVL

SEQ ID NO: 13 - protein, 90 aa, lymphocytic choriomeningitis virus (LCMV)
  Amino acid sequence of Z protein in LCMV
MGQGKSREEKGTNSTNRAEILPDTTYLGPLSCKSCWQKFDSLVRCHDHYLCRHCLNLLLSVSDRCPLCKYPLPTRLKISTAPSSPPPYEE

SEQ ID NO: 14 - protein, 99 aa, Lassa virus
  Amino acid sequence of Z protein in Lassa virus
MGNKQAKAPESKDSPRASLIPDATHLGPQFCKSCWFENKGLVECNNHYLCLNCLTLLLSVSNRCPICKMPLPTKLRPSAAPTAPPTGAADSIRPPPYSP

SEQ ID NO: 15 - protein, 95 aa, Pichinde virus
  Amino acid sequence of Z protein in Pichinde virus
MGLRYSKEVRKRHGDEDVVGRVPMTLNLPQGLYGRFNCKSCWFVNKGLIRCKDHYLCLGCLTKMHSRGNLCEICGHSLPTKMEFLESPSAPPYEP

SEQ ID NO: 16 - protein, 94 aa, Junin virus
  Amino acid sequence of Z protein in Junin virus
MGNCNGASKSNQPDSSRATQPAAEFRRVAHSSLYGRYNCKCCWFADTNLITCNDHYLCLRCHQGMLRNSDLCNICWKPLPTTITVPVEPTAPPP

SEQ ID NO: 17 - protein, 99 aa, Oliveros virus
  Amino acid sequence of Z protein in Oliveros virus
MGSKSSKSSGFENVPSLGLSHTNQPRVSLIREARPSLYGRYNCKCCWFQNKNLVECSDHYLCLKCISSMLRRGQNCEICGKPIPTHIAVTTAPTAPPEP

SEQ ID NO: 18 - protein, 95 aa, Tamiami virus
  Amino acid sequence of Z protein in Tamiami virus
MGLRYSKEVRDRHGDKDPEGRIPITQTMPQTLYGRYNCKSCWFANKGLIKCSNHYICLRCLTSMLNRTDYCEICGEVLPKRLTFETTPTAPPYTP

SEQ ID NO: 19 - protein, 2210 aa, lymphocytic choriomeningitis virus (LCMV)
  Amino acid sequence of L protein in LCMV
MDEIISELRELCLNYIEQDERLSRQKLNFLGQREPRMVLIEGLKLLSRCIEIDSADKSGCTHNHDDKSVETILVESGIVCPGLPLIIPDGYKLIDNSLILLECFVRSTPASFEKKFIEDTNKLACIREDLAVAGVTLVPIVDGRCDYDNSFMPEWANFKFRDLLFKLLEYSNQNEKVFEESEYFRLCESLKTTIDKRSGMDSMKILKDARSTHNDEIMRMCHEGINPNMSCDDVVFGINSLFSRFRRDLESGKLKRNFQKVNPEGLIKEFSELYENLADSDDILTLSREAVESCPLMRFITAETHGHERGSETSTEYERLLSMLNKVKSLKLLNTRRRQLLNLDVLCLSSLIKQSKFKGLKNDKHWVGCCYSSVNDRLVSFHSTKEEFIRLLRNRKKSKVFRKVSFEELFRASISEFIAKIQKCLLVVGLSFEHYGLSEHLEQECHIPFTEFENFMKIGAHPIMYYTKFEDYNFQPSTEQLKNIQSLRRLSSVCLALTNSMKTSSVARLRQNQIGSVRYQVVECKEVFCQVIKLDSEEYHLLYQKTGESSRCYSIQGPDGHLISFYADPKRFFLPIFSDEVLYNMIDIMISWIRSCPDLKDCLTDIEVALRTLLLLMLTNPTKRNQKQVQSVRYLVMAIVSDFSSTSLMDKLREDLITPAEKVVYKLLRFLIKTIFGTGEKVLLSAKFKFMLNVSYLCHLITKETPDRLTDQIKCFEKFFEPKSQFGFFVNPKEAITPEEECVFYEQMKRFTSKEIDCQHTTPGVNLEAFSLMVSSFNNGTLIFKGEKKLNSLDPMTNSGCATALDLASNKSVVVNKHLNGERLLEYDFNKLLVSAVSQITESFVRKQKYKLSHSDYEYKVSKLVSRLVIGSKGEETGRSEDNLAEICFDGEEETSFFKSLEEKVNTTIARYRRGRRANDKGDGEKLTNTKGLHHLQLILTGKMAHLRKVILSEISFHLVEDFDPSCLTNDDMKFICEAVEGSTELSPLYFTSVIKDQCGLDEMAKNLCRKFFSENDWFSCMKMILLQMNANAYSGKYRHMQRQGLNFKFDWDKLEEDVRISERESNSESLSKALSLTQCMSAALKNLCFYSEESPTSYTSVGPDSGRLKFALSYKEQVGGNRELYIGDLRTKMFTRLIEDYFESFSSFFSGSCLNNDKEFENAILSMTINVREGFLNYSMDHSKWGPMMCPFLFLMFLQNLKLGDDQYVRSGKDHVSTLLTWHMHKLVEVPFPVVNAMMKSYVKSKLKLLRGSETTVTERIFRQYFEMGIVPSHISSLIDMGQGILHNASDFYGLLSERFINYCIGVIFGERPEAYTSSDDQITLFDRRLSDLVVSDPEEVLVLLEFQSHLSGLLNKFISPKSVAGRFAAEFKSRFYVWGEEVPLLTKFVSAALHNVKCKEPHQLCETIDTIADQAIANGVPVSLVNSIQRRTLDLLKYANFPLDPFLLNTNTDVKDWLDGSRGYRIQRLIEELCPNETKVVRKLVRKLHHKLKNGEFNEEFFLDLFNRDKKEAILQLGDLLGLEEDLNQLADVNWLNLNEMFPLRMVLRQKVVYPSVMTFQEERIPSLIKTLQNKLCSKFTRGAQKLLSEAINKSAFQSCISSGFIGLCKTLGSRCVRNKNRENLYIKKLLEDLTTDDHVTRVCNRDGITLYICDKQSHPEAHRDHICLLRPLLWDYICISLSNSFELGVWVLAEPTKGKNNSENLTLKHLNPCDYVARKPESSRLLEDKVNLNQVIQSVRRLYPKIFEDQLLPFMSDMSSKNMRWSPRIKFLDLCVLIDINSESLSLISHVVKWKRDEHYTVLFSDLANSHQRSDSSLVDEFVVSTRDVCKNFLKQVYFESFVREFVATTRTLGNFSWFPHKEMMPSEDGAEALGPFQSFVSKVVNKNVERPMFRNDLQFGFGWFSYRMGDVVCNAAMLIRQGLTNPKAFKSLKDLWDYMLNYTKGVLEFSISVDFTHNQNNTDCLRKFSLIFLVRCQLQNPGVAELLSCSHLFKGEIDRRMLDECLHLLRTDSVFKVNDGVFDIRSEEFEDYMEDPLILGDSLELELLGSKRILDGIRSIDFERVGPEWEPVPLTVKMGALFEGRNLVQNIIVKLETKDMKVFLAGLEGYEKISDVLGNLFLHRFRTGEHLLGSEISVILQELCIDRSILLIPLSLLPDWFAFKDCRLCFSKSRSTLMYETVGGRFRLKGRSCDDWLGGSVAEDID

SEQ ID NO: 20 - protein, 2220 aa, Lassa virus
  Amino acid sequence of L protein in Lassa virus
MEEDIACVKDLVSKYLVDNERLSRQKLAFLVQTEPRMLLMEGLKLLSLCIEVDSCNANGCEHNSEDKSVERILHDHGILTPSLCFVVPDGYKLTGNVLILLECFVRSSPANFEQKYIEDFKKLEQLKEDLKSVDINLIPLIDGRTSFYNEQIPDWVNDKLRDTLFSLLKYAQESNSLFEESEYSRLCESLSMTSGRLSGVESLNVLMDNRSNHYEEVIASCHQGINNKLTAHEVKLQIEEEYQVFRNRLRKGEIEGQFLKVDKSQLLNELNNLYADKVVAEDNIEHLIYQFKRASPILRFLYANVDEGNEKRENQTIGECQVQCWRSFLNKVKSLRILNTRRKLLLIFDALILLASKHDLMKQKCLKGWLGSCFLSVNDRLVSLESTKRDLEKWVERRQQAERSRITQSSQCLSKNQILNSIFQKTILKATTALKDVGISVDHYKIDMEVICLNSYDLIMDFDVSGVVPTISYQRTEEETFPYVMGDVELLGTTDLERLSSLSLALVNSMKTSSTVKLRQNEFGPARYQVVRCKEAYCQEFSLGNTELQLIYQKTGECSKCYAINDNKVGEVCSFYADPKRYFPAIFSAEVLQTTISTMISWIEDCNELEGQLNNIRSLTKMILVLILAHPSKRSQKLLQNLRYFVMAYVSDYHHKDLIDKIREELITDVEFLLYRLIRTLMNLVLSEDVKSMMTNRFKFILNVSYMCHFITKETPDRLTDQIKCFEKFLEPKVRFGHVSTNPADTATEEELDDMVYNAKKFLSKDGCTSIEGPDYKRPGVSKKYLSLLTSSFNNGSLFKEREVKREIKDPLITSGCATALDLASNKSVVVNKYTDGSRILNYDFNKLTALAVSQLTEVFSRKGKYLLNKQDYEYKVQQAMSNLVLGSGQLKSDADGADLDEILLDGGASDYFDQLKETVEKIVDQYREPVKLGSGPNGDGQPSINDLDEIVSNKFYIRLIKGELSNHMVEDFDHDILPGKFYEEFCNAVYENSRLKQKYFYCGHMSQCPIGELTKAVSTRTYFNHEYFQCFKSILLIMNANTLMGRYTHYKSRNLNFKFDMGKLSDDVRISERESNSEALSKALSLTNCTTAMLKNLCFYSQESPQSYDSVGPDTGRLKFSLSYKEQVGGNRELYIGDLRTKMFTRLIEDYFEAISLQLSGSCLNNEKEFENAILSMKLNVSLAHVSYSMDHSKWGPMMCPFLFLTVLQNLIFLSKDLQADIKGRDYLSTLLMWHMHKMVEIPFNVVTAMMKSFIKAQLGLRKKTKQSITEDFFYSNFQVGVVPSHISSILDMGQGILHNTSDFYALISERFINYAISCICGGTIDAYTSSDDQISLFDQSLTELLQRDPEEFRTLIEFHYYMSDQLNKFVSPKSVIGRFVAEFKSRFFVWGDEVPLLTKFVAAALHNIKCKEPHQLAETIDTIIDQSVANGVPVHLCNLIQKRTLNLLQYARYPIDPFLLNCETDVRDWVDGNRSYRIMRQIEGLIPNACSKIRSMLRKLYNRLKTGQLHEEFTTNYLSSEHLSSLRNLCELLDVEPPSESDLEYSWLNLAAHHPLRMVLRQKIIYSGAVNLDDEKIPTIVKTIQNKLSSTFTRGAQKLLSEAINKSAFQSSIASGFVGLCRTLGSKCVRGPNKENLYIKSIQSLISDVKGIKLLTNSNGIQYWQVPLELRNGSGSESVVSYFRPLLWDYMCISLSTAIELGAWVLGEPKTVKVLDFFKHNPCDYFPLKPTASKLLEDRVGLNHIIHSLRRLYPSVFEKHILPFMSDLASTKMKWSPRIKFLDLCVALDVNCEALSLVSHIVKWKREEHYIVLSSELRLSHSRTHEPMVEERVVSTSDAVDNFMRQIYFESYVRPFVATTRTLGSFTWFPHKTSVPEGEGLHRMGPFSSFVEKVIHKGVERPMFKHDLMMGYAWIDFDIEPARFNQNQLIASGLVDPKFDSLEDFFDAVASLPPGSAKLSQTVRFRVKSQDASFKESFAIHLEYTGSMNQQAKYLVHDVTVMYSGAVSPCVLSDCWRLVLSGPTFKGKSAWYVDTEIINEFLIDTNQLGHVTPVEIVVDMERLQFTEYDFVLVGPCTEPTPLVVHRGGLWECGKKLASFTPVIQDQDLEIFVREVGDTSSDLLIGALSDMMIDRLGLRMQWSGVDIVSTLRAAAPSCEGILSAVLEAVDNWVEFKGYALCYSKSRGKVMVQSSGGKLRLKGRTCEELTRKDECIEDIE

SEQ ID NO: 21 - protein, 2194 aa, Pichinde virus
  Amino acid sequence of L protein in Pichinde virus
MEEYVFELKDIVRKWVPEWEELSEQKNNVLAQVKDRAITIEGLKLLSMLVEVDSCKKHSCKHNTKMTVNAILRELRVTCPTLPDVTPDGYCMVGDVLILLEVFVRTSQEAFEKKYNQDFLKLLQLSSDLKRQNITLVPVIDGRSSYYVEFVPDWVVERLRWLLLKLMDGLRTSGEEVEELEYERLISSLSSLENQSLGLESLLAVKERGLPYKVRLEKALMSGINNKLTTDQCRTKIMEIFQQFKMLQLAGQLDRKLQATDREDMISRLQNHEFIQCSVKDVPKSEIRLCEFCSVHILGIIGQLRQSEVKHSSTESREYFRVLSICNKIKSQKVFNTRRNTMLVLDLIMYNILCDLDKSSPGAVFREVLLMQGLPSVNDRLINVDFLMEQITKKFIKNPNWLEKAKKRLSSVCGELPLDDILPLLREPDVEYYFNLKTSVLDEWGAKPCLQYKTKSQCMCGGRPGRGQPDYTIMGESEFEELLKTLSSLSLSLINSMKTAAVPKMKVNNADEFYGKVYCDEVFFQRFGEGGSLTLLYQKTGERSRCYAVAYRSKSGGLYETKASFYCDPKRFFLPIFSADVIQRTCVEMLSWLDFMSQPLLDSVSDLLRRLILCILCTPSKRIQVYLQGFRYYIMAFVNEVHFKELFEKLKVVMLTPSEWQTAMLIDDLILLVLSNSREEDMAKIFKFVLNVSYLCHFITKETPDRLTDQIKCFEKFLEPKLKFDSVLVNPSNSMELPTEEEEKMVHDIERLLGKKLESKCEGRPGLNKDVLSVCLSLFNSSSLEVKPLLPCDPMTPSFTSTALDMSSNKSVVVPKLNEVGEVITEYDYSSIVSAVVVEMIEHFKTKGKYKLDPKEVNFKILKRLSSLIQIKKESIEPDGVEELLSEDQGDCLKEIETRVAKVLSKVDTNVKTNLKTSCPLERLWPKSTMVVIKRETSLHDVKDFDYSLFSAEVYEDLVNLIYEDVTARSVYFADRLMNPCPLEFLIKNLTLKAYKEADYFECFKYILIASDYDNRVGRYDHKSRSRLGFTDAALQIRETSRISSRESNSESIAKRLDQSFFTNSSLRNLCFYSDESPTERSGVSTNVGRLKFGLSYKEQVGGNRELYVGDLNTKLTTRLIEDYSESLMQNMRYTCLNNEKEFERALLDMKSVVRQSGLAVSMDHSKWGPHMSPVIFAALLKGLEFKLKDGSEVPNAAVINILLWHIHKMVEVPFNVVEAYMKGFLKRGLGMMDKGGCTIAEEFMFGYFEKGKVPSHISSVLDMGQGILHNTSDLYGLITEQFINYALELCYGARFISYTSSDDEIMLSLNEGFKFKDRDELNVELVLDCMEFHYFLSDKLNKFVSPKTVVGTFASEFKSRFFIWSQEVPLLTKFVAAALHNIKAKAPNQQADTIDTILDQCVANGVSIEVVGAIAKRTNSMIIYSGFPNDPFLCLEEMDVLDWVNGSRGYRLQRSIETLFPDDLLLSIIRKACRKIFYKIQSGALEESYIVTTLQQSPDDCLKQLLETCDVETEAIEDALNIRWLNLRVHGDLRLVLRTKLMSTTRTVQREEIPSLVKSVQSKLSKNYVRGAKKILADAINKSAFQSSIASGFIGVCKSMGSKCVRDGKGGFKYIRDITSKIILHRDCHFCNQRKGVYCKAALGEVSEYSRPLIWDYFALVLTNACELGNWVFQKAEVPKIVTHLNNPNHFWPIKPSTHSELEDKVGINHILYSIRRNFPTLFDEHISPFLSDLNMLRLSWVQRIKFLDLCVAIDITSECLGIVSHIIKHRREELYIVKQNELAMSHSRESHPLERGFNLEPEEVCTNFLIQILFESMLVPVIMSTSQFKKYFWFGELELLPNNAQHDLKQLTQFICDCKKNNTSRTMNLDDLDVGFVSSKLILSCVNLNISVFINELDWVNRDNYENIEQLILASPSEVIPIELNLTFSHKRVSHKFRYERSTNYILKLRFLIERESLLDSLDSDGYLLLNPHSVEYYVSQSSGNHISLDGVSLLVLNPLINGKDVLDFNDLLEGQDIHFKSRSTVFQKVRIDLKNRFKDLKNKFSYKLIGPDVGMQPLILEGGLIKEGNRVVSRLEVNLDSKVVIIALEALEPEKRPRFIANLFQYLSSAQSHNKGISMNEQDLRLMIENFPEVFEHMLHDAKDWLNCGHFSIIRSKTLGSVMIADETGPFKIKGIRCRKLFEDNESVEIE

SEQ ID NO: 22 - protein, 2210 aa, Junin virus
  Amino acid sequence of L protein in Junin virus
MEESVNEIKSLIRKHFPERQELAYQRDIFLSQHHPSSLLLEGFKLLSSLVELESCEAHACQINSDQKFVDVILSDYGILCPTLPKVIPDGFKLTGKTLILLETFVRVNPDEFERKWKSDMSKLLNLKSDLLRAGITLVPVVDGRSSYSNRFLADWVVERVRWLLIDILKKSKFMQEINIEEQEYQRLIHSLSNTKNQSLGLENIECLKKNSLGYDERLNESLFVGVRGDIRESVIREELIKLRFWFKKEIFDKQLGKFKFSQKSKLINDLILLGSHKDSDVPSCPFCANKLMDVVYSIALHPIDEVNMESQSDENSISIDAVERCYLQALSVCNKVKGLKVFNTRRNTLLFLDLVLLNLLCDLFKTHDDAIVRLRNAGIVVGQMLMLVNDRLLDILEAIKLIRKKLMTSPKWVQACSRTLKNSHQDLWSQLEKLIKHPDMDSLMILAQALVSDRPVMRYTINKEFEKICRHQPFSSLVEGEQKKLFRILSSISLALVNSMKTSFSSRLLINEREYSRYFGNVRLRECYVQRFHLTKNTFGLLFYQKTGEKSRCYSIYLSINGVLEEQGSFYCDPKRFFLPIFSEDVLIEMCEEMTSWLDFSHELMTMTRPILRLLVLAVLCSPSKRNQTFLQGLRYFLMAYANQIHHVDLMSKLRVDCMSGSEVLIQRMAVELFQTILGEGEDADLYFARRFKYLLNVSYLCHLVTKETPDRLTDQIKCFEKFIEPKVKFDCVVVNPPLSGSLTLEQEDTMIRGLDRFFSKEAKTSSDTQIPGVCKEILSFCISLFNRGRLKVTGELKSNPYRPNITSTALDLSSNKSVVIPKLDELGNILSVYDKEKLVSTCVSTMAERFKTKGRYNLDPDSMDYLILKNLTGLVSTGSRTRTNQEELSVMYESLTEDQVRAFEGIRNDVQMTLAKMANSEGTKVEITKLKSKNPSVDERESLESLWAPFGVLREIKAEVSMHEVKDFDPDVLRSDVYKELCDAVYLSPFKLTYFLEAPQDICPLGLLLKNLTTIAYQEDEFFECFKYLLIQGHYDQKLGSYEHRSRSRLGFSSEVLRLKDEVRLSTRESNSEAIADKLDKSYFTNAALRNLCFYSDDSPTEFTSISSNTGNLKFGLSYKEQVGSNRELYVGDLNTKLMTRLVEDFSEAVGSSMKYTCLNSEKEFERAICDMKMAVNNGDLSCSYDHSKWGPTMSPALFLSFLYTLELKNPRDRTKVNLEPVMNILKWHLHKVVEVPINVAEAYCVGKLKRSLGLMGCDCTSVGEEFFHQYLQSRDQVPSHIMSVLDMGQGILHNTSDLYGLITEQFLCYALDLLYDVIPVTYTSSDDQVSLIKIPCLSDEKFQDRTELLEMVCFHEFLSSKLNKFISPKSVIGTFVAEFKSRFFVMGEETPLLTKFVSAALHNVKCKTPTQLSETIDTICDQCIANGVSTHIVSKISIRVNQLIRYSGYRETPFGAIEEQDVKDWVDGSRGYRLQRKIEAIFSDDKETMFIRNCARKVFNDIKRGKIFEENLINLISRGGDEALSGFLQYAGCSEDEIRQTLDYRWVNLASFGDLRLVLRTKLMTSRRVLEKEEMPTLIRTIQSRLSRNFTKGVKKILAESINKSAFQSSVASGFIGFCKSMGSKCVRDGKGGFLYIKDIFTRIMPCLCGICERKPKVIYCQKSLKEVNQFSKPILWDYFSLVLTNACELGEWVFSAIKSPQAPLVLCNKNFFWAVKPKAVRQIEDQLGMNHVLHSIRRNYPKLFEEHLAPFMNDLQVNRSLDSGRLKFLDVCVALDMMNENLGIISHLLKVRDNNVYIVKQSDCASAHVRQSEYTNWEVGISPQQVCRNFMVQVVLSSMINPLVMSTSCLKSFFWFNEVLDLEDDSQVDLAELTDFTLSVRNNKVSRAMFVEDIAMGYVVSSFDNIKVFLEGVSVDNISLLPQEDMMDLHTVLRNVACQEAVKLKLIIQVEHTRVSTKFKLRRKMVYSYTIVSSLGVDDVGTPELELNVDAMSQCVSGSEGSHSLLDGALVIASLPLFTGHESFDLAGLFIDAGYAATNDDNILSHVKFNFGDFYSELSNKYAYDLIGPDNPGEPLVLKEGIFYRGNERLSTYRVELSGDVIVKAIGALEDIDSVETLLSQLWPYLKTTSQTILFQQEDFVLVYDLHKEQLIRSLDKFGDWLEFSNFKVAFSRSLNDLLISDPQGQFRLKGVTCRPLKHKVEIKDID

SEQ ID NO: 23 - protein, 2234 aa, Oliveros virus
  Amino acid sequence of L protein in Oliveros virus
MDESVSSLFDLLRKHFPAKEEISRQITVVTSQTEMRMILTEGFKLLSLLIELDSCEVNNCSHNKEDLTVEAILSKDNILTIALPRIVPDGYSLYGNVLILLETFVRVNPSSFEQKYNQDMNKLLSLKNDLQLCGITLVPLVDGRTNYYNKFVDDWVIERFRWLLTQIMKVAKESGESIEELEYQRLVTSLSKLENQSLGFENIIKMPQTGIDYRDKLKARMFANLSNKMKESEINQSLLSLKLAFDEAYNDESHLKKFQKTNKEDLIFKLGQQINLSDEKLSCMSCSSKLFSIVSSITQNRDKLDSHVMSVSNAKLWHHESGIANVNEYLRILSVCNKIKSAKILNTRRNTLLFLDMIVLNFIDDCWKNDPTILFQFKKSGLLVGQLAYFVNDRFFDLLLLKELLSKKLKSSPDWIHRCLCNIRKQEFFDISGVEFWIRQPDYESVEELCCALEPVKPKLQYCRDEDNHENHKLDLADKDNYFTCLSVLSSVCLGLVNSMKTSFTSKMVINEKSPNNFYGEVELKECYCQRFYVSDEITGLLFYQKTGEKSRCYSIGVTMHGSYKYIGSFYCDPKRFFLPIFSQVVLFQMTEEMMSWLPEEPSYKEPVVANLRKLILMLLCNPSKRNQNFLQGMRYFIMAYVNQFHSVELMSKLEVPCKSVSEECVQKLTYNLLVDVLTKGDVNEHMTRKFKFCLNVSYLCHLITKETPDRLTDQIKCFEKFLEPKLKFKSVIINPNLTGDLTEEQEEQLLNSIEKLLGKGLQDINDSSEPGISRELLSMCISAFNRDLLRVNGKLKNDPYKPNFTSTALDLSSNKSVVIPKLDELGNPISKYDYELLVSSCIASMAESFKTKGKYKLDPTSQEFLILKNLYSLMSKSKRDDHMKDSEDSKQNLSSDLENLSEEQVLILEQVKRDVNLALSKMRETKLKEKTEARQSSSGSSLKNQQKRQAELQERLSELWSEFMCMKIITVEVSLHEIKDFDPDLIDHTTLKSMLDKLYNSDLASEFFLEEILNPCPLEFLVKNMTTSSYLEGDLFECFKYTLISAGFDQKLGTYEHKNKTRLGFKYEALKVREEGRMSLRESNSEAIARRLDRSVFSNSALRNLCFYSDESPISYSHVSSDTGKLKFGLSYKEQVGSNRELYVGDLNTKLMTRLIEDFSESVVSNMNYSCLNSEKEFERSVMEMKMSVNLGEMNFSLDHSKWGPYMSPVIFAAFLQGLKLEQGSMCTPVSVEPIITLLSWHIHKVVEVPYNVIHAYMTGMIKRQLGLMSPGESSKTEAFIHRLLVDEREPLSHVMSVLDMGQGILHNTSDLYGLVTEQFINYAMRILYDVSMTSFTSSDDQITMVKLNEDLKDMDNPEVISNWERMINFHTFISSKFNKFVSPKTVIGTFAAEFKSRFFVWGEEVPLLTKFVSAALHNIKCKTPIQLSETIDTISDQCVANGVSVEIVSCISNRTNKLVRYSGFPDNPFLSVENMDVKDWVDGNRGYRLQRNIESHLEVDGCTRFVRQAARKVFRNIKSGKIMEQTLVNLVQEDGDKAFQGFMKSVDVSDDDIKLLQNFRWINLSTHGDMRLVLRTKLMSSRRIIEQEEIPGLIKSIQSKLSKNFVRGAKRILADSINKSAFQSSIASGFIGFCKSMGSKCVRLGGGGFGYIKDIKNKVKHDCLCDICFRWRGCVYCPSSCADVFEFSRPLMWDYFTLVLTNACELGEWVFEDVEIPKDLYFLRNPNLFWLVKPRVTCQLEERLGLSHILQSIRKNYPTLFETHLSPFMSDFMVGKTLGSLTVKFLDLCVALDLANENLGITKHFLKERRHEIYVVKQDESSQSHIRNVKGIESSVELNSMQVCNNFLTQLLMSSFIQPLVLTSSVFKKFNWFAEVLCLKTEEEVCLKQLTDFVLQVKKFNVDRAMHIEDLSAGYISSTINVTSFSLSVPTFLECVDSDFINKEGNEPGDFKDLLSSEFTKDTLTLDFCIQVSHIKRSVKFNVKRTLVYTLAVRTQIEKKIILEAIGTDDQISLIVSELDLFCSGHTGNHFVLDAAPLIYSEPLIAGSLKFDLLSMLRDQELSLTSSEKMPTFNFDFSSQKHHIVNKFAYKLVGPSVYDEPLVLNKGIVYSGERKLTSLGVDVSGERIVQAMGELDSISEQELFLTNLWGYSKETDIKVRIIQDNLKILTDNYFVQLKNSLKTFAEWLNLGNYMLCYSKTLDTIMISDVSGRIKLKGVICRKLIEDEVMEVE

SEQ ID NO: 24 - protein, 2221 aa, Tamiami virus
  Amino acid sequence of L protein in Tamiami virus
MSECLTYFNELKDLVRKWVPDEDTYVEQKTVLLSQVNFSSIVTEGLKLLSTLIEVDSCVKHGCIHNRSKTVNQILYDHRIVGPTLPDVVPDGYRVSGSTLILLETFVRVNQESFECKYRHDFEKLMQLSKDLAKCGLTLVPVIDGRSSYYIERLPDWVIERMRWLLLRIMSNLRDSGEKIEEMEYERLVHSLSNMENQNLGLESLASLREEGLDYKTRLTKTLKEGIYSNMTTSECRVGIAKLYDHFCLLRDSGQYEDVYTTTSRSEMITWLKTHELVQMSSSERETLIEAETCKFCQIHMYAVLKDLVLLRKGWKGSRCRDANEILAHKSLLSDCNKIKGLKVLNTRRNTLLCLDIIVLNSLINLIKLQYTDLQYLINNHFKSVNDRLVSVDLIINKLDKRLTSDPNWLCKLRTKIGHKLKIYDLDHVISWLRPIEVSHWYEFKLERDNSGECVKPTIKYKKSGVGDCQGEDCNKDVITDDSTFSDYLDALSTLSMGLMNSMKTSSATKLVVNDERNYFGTVQCDECYFQDLDINYGTTLIYQKTGEGTRCYGKVSKEGGGPDVYKVGKSFYADPKRYFLPIMSSEVILKMCREMLSWLDWLSEKEMMDVRTKLYTLVISILTVPSKRVQIYLQGFRYFIMAYVNEFHVKELVCKLKVKPLTRAELSVFTQMDDLVALLLTGTSEEHMTKSFKFILNLSYLCHLITKETPDRLTDQIKCFEKFLEPKLTFNSVILNLDSSPQLTEGTEEKIIGDLKKLFSKDLGVLDLKEPGVSKEVLSLCSSCFNNGMLSLPKVLSRDPQSPSFTSTALDISSNKSVVVPKLNEVGETITQYDYQSLLSSVVVEMAQSFKDKLRFKLDRRSLQYAIYKRLTNMVSKNEFRSKDDPNDSGILEDIEDLVDEGTHKLINEIEANVSDCLSKMSSGCNKSNQSSKGLKKFEKVDLLQKLWSREYMSLILSETSFHEVKDFDPSLLPSESYQEMCDAVYDSVYRNEFFTEKFLKLCPLELLIKNLATKHYEEGDYFECFKYLLIGAGCDNRVGRFDHRSRARLGFKDTATLVKEESRISSRESNSEAISKRLDKSFFTNSSLRNLCFYSEESPTYRSSVSSSVGKLKFGLSYKEQVGSNRELYIGDLNTKLTSRLIEDYFESLTSECRFSCLNNDSEFERALLDMKSVVRLSGLAVSLDHSKWGPYMSPAIFNALFSNLDLQLKDGGLIDKSPIENLLNWHLHKIVEVPYNVVEAYLKGYTKRSLGLMDRSSSSMTEDYFFRQFAKGVVPSHITSVLDMGQGILHNASDYYGLLTEQFITLCLELCFDVKMTAYTSSDDEIMLSNSYSLKRESDDDLLDMEKCKEILEFHYYLSSKLNKFISPKTVAGSFASEFKSRFFIWSQEVPLLTKFVAAALHNVKAKSPHQLAETIDTILDQCAANGVSIEIINELSKRTNRLISYSGHPVDPFLCVFTTDLKDWVDGSRGYRLQRSIESIINSEEILSTIRDSCRQLFYMIRSGRIQEEYLISALQSSPDDCLRQMLKITGTNDSLIEEALTTRWLNLRAFGDLRLVLRTKIMTGTRILDKEEVPSLIKSVQSKLSKNFVRGAKKIITDAINKSAFQSSICSGFIGLCKSMGSKCVRDGSGGFIYIKDLLKKIDRHTNCEVCCPLLSVFCEHSLRQVAPYSRPLLWDYFSLTFSNACELGNWVFSKVELPRPPLGSMNPNFFWPVKPGSHSELEDKVNMNHVLYSIKRNFPDLFDEHIAPFLSDLNSLKVSWVQRIKFLDLCVAMDMSSECLGIISHIMRKRREELYIVKQEELSVCHIRESCSLEKGLQLNSVEICQNFLTQLLFESMLNPVLLSTSQFKKYFWYGEVEFLPNDADHDLGQLTQFIMDCKLLNISRCMCLDDLDVGYVHSKIELSQVFINLSTFINLVDWENRESYQSFDEVLIHSNADHIPLEIGIILSHTRKSFKFRYERKTNYYVKCGITIQKSEISSFSTTLSDGFELHVEEIDCYVSGSEGDHISLDGVGLVPLHPLFSGKEALDLNKLLSDQDIEFKQISLVFSKVKLDFKDHVKDLKNKFSYKLQGPEQGLEPLHLDKGQIMERNTVVSRLEVPVTSRSLFLALEALDPGNRPRFLSSLHEYMRKRPGKKDPCFVRMTQQDLCLLVELYEAAFMQVLSAVSDWIEFGCFALCFSKTLNCIMIADDGGDYRLKGRPCKTLSAQKTLTDIE

SEQ ID NO: 25 - protein, 58 aa, lymphocytic choriomeningitis virus (LCMV)
  Amino acid sequence of GP signal peptide in LCMV
MGQIVTMFEALPHIIDEVINIVIIVLIIITSIKAVYNFATCGILALVSFLFLAGRSCG

SEQ ID NO: 26 - protein, 58 aa, Lassa virus
  Amino acid sequence of GP signal peptide in Lassa virus
MGQIITFFQEVPHVIEEVMNIVLIALSLLAILKGVYNVATCGIIGLVTFLFLCGRSCS

SEQ ID NO: 27 - protein, 58 aa, Pichinde virus
  Amino acid sequence of GP signal peptide Pichinde virus
MGQVVTLIQSIPEVLQEVFNVALIIVSTLCIIKGFVNLMRCGLFQLITFLILAGRSCD

SEQ ID NO: 28 - protein, 58 aa, Junin virus
  Amino acid sequence of GP signal peptide in Junin virus
MGQFISFMQEIPTFLQEALNIALVAVSLIAIIKGIVNLYKSGLFQFFVFLALAGRSCT

SEQ ID NO: 29 - protein, 58 aa, Oliveros virus
  Amino acid sequence of GP signal peptide in Oliveros virus
MGQVIGFFQSLPNIINEALNIALICVALIAILKGIVNIWKSGLIQLFIFLILAGRSCS

SEQ ID NO: 30 - protein, 58 aa, Tamiami virus
  Amino acid sequence of GP signal peptide in Tamiami virus
MGQLISFFGEIPTILQEALNIALIAVSIIATIKGVVNVWKSGLIQLLMFVMLAGRSCS

SEQ ID NO: 31 - protein, 207 aa, lymphocytic choriomeningitis virus (LCMV)
  Amino acid sequence of GP1 in LCMV
MYGLNGPDIYKGVYQFKSVEFDMSHLNLTMPNACSANNSHHYISMGSSGLELTFTNDSILNHNFCNLTSAFNKKTFDHTLMSIVSSLHLSIRGNSNHKAVSCDFNNGITIQYNLSFSDPQSAISQCRTFRGRVLDMFRTAFGGKYMRSGWGWAGSDGKTTWCSQTSYQYLIIQNRTWENHCRYAGPFGMSRILFAQEKTKFLTRRLA

SEQ ID NO: 32 - protein, 199 aa, Lassa virus
  Amino acid sequence of GP1 in Lassa virus
LIYKGSYELQTLELNMETLNMTMPLSCTKNSSHHYIRVGNETGLELTLTNTSIINHKFCNLSDAHKRNLYDHALMSILSTFHLSIPNFNQYEAMCDFNGGKISVQYNLSHAYAVDAAEHCGTVANGVLQTFMRMAWGGSYIALDSGRGNWDCIMTSYQYLIIQNTTWEDHCQFSRPSPIGYLGLLSQRTRDIYISRRLL

SEQ ID NO: 33 - protein, 215 aa, Pichinde virus
  Amino acid sequence of GP1 Pichinde virus
GMMIDRRHNLTHVEFNLTRMFDNLPQSCSKNNTHHYYKGPSNTTWGIELTLTNTSIANETTGNFSNIRSLAYGNISNCDKTEEAGHTLKWLLNELHFNVLHVTRHVGARCKTVEGAGVLIQYNLTVGDRGGEVGRHLIASLAQIIGDPKIAWVGKCFNNCSGGSCRLTNCEGGTHYNFLIIQNTTWENHCTYTPMATIRMALQKTAYSSVSRKLL

SEQ ID NO: 34 - protein, 193 aa, Junin virus
  Amino acid sequence of GP1 in Junin virus
EEAFKIGLHTEFQTVSFSMVGLFSNNPHDLPLLCTLNKSHLYIKGGNASFQISFDDIAVLLPQYDVIIQHPADMSWCSKSDDQIWLSQWFMNAVGHDWHLDPPFLCRNRAKTEGFIFQVNTSKTGVNGNYAKKFKTGMHHLYREYPDPCLNGKLCLMKAQPTSWPLQCPLDHVNTLHFLTRGKNIQLPRRSLK

SEQ ID NO: 35 - protein, 225 aa, Oliveros virus
  Amino acid sequence of GP1 in Oliveros virus
HTFQIGRNHEFQSITLNFTQFLGYAPSSCSVNNTHHYFRGPGNVSWGIELTLTNNSVINASNSLKVFTNIHHNITNCVQNIDEQDHLMKWLIETMHLQIMKPGKRLPPILCEKDKGLLIEYNLTNIASREEKHSEYWSQLLYGLSKLLGSSKSLWFDYCQRADCMMQEHSSHLKCNYSECSGHTTFKYLILQNTTWENHCEFNHLNTIHLLMSSTGQSFITRRLQ

SEQ ID NO: 36 - protein, 193 aa, Tamiami virus
  Amino acid sequence of GP1 in Tamiami virus
VQIGHHLELEHIILNSSSILPFTPTLCKLNKTYFLVRGPFQAHWGVDLAIGSTTVAVENATKTYTLKSKNFTGCFEGNPDPDSAALLVTWLFNSLHHDYKNDPSILCERVSGENSFRFQINISEPEYCEKILSRMANLFGSFENYCLNNRHIKKLIIIRNLTWSQQCHENHMSAMQLITSNIHTQVVRARRIL

SEQ ID NO: 37 - protein, 233 aa, lymphocytic choriomeningitis virus (LCMV)
  Amino acid sequence of GP2 in LCMV
GTFTWTLSDSSGVENPGGYCLTKWMILAAELKCFGNTAVAKCNVNHDEEFCDMLRLIDYNKAALSKFKQDVESALHVFKTTVNSLISDQLLMRNHLRDLMGVPYCNYSKFWYLEHAKTGETSVPKCWLVTNGSYLNETHFSDQIEQEADNMITEMLRKDYIKRQGSTPLALMDLLMFSTSAYLISIFLHLVKIPTHRHIKGGSCPKPHRLTNKGICSCGAFKVPGVKTIWKRR

SEQ ID NO: 38 - protein, 232 aa, Lassa virus
  Amino acid sequence of GP2 in Lassa virus
GTFTWTLSDSEGNETPGGYCLTRWMLIEAELKCFGNTAVAKCNEKHDEEFCDMLRLFDFNKQAIQRLKSEAQMSIQLINKAVNALINDQLIMKNHLRDMMGIPYCNYSKYWYLNHTSSGRTSLPKCWLVSNGSYLNETHFSDDIEQQADNMITEMLQKEYIDRQGKTPLGLVDLFVFSTSFYLISIFLHLIKIPTHRHIVGKPCPKPHRLNHMGICSCGLYKQPGVPTRWKR

SEQ ID NO: 39 - protein, 235 aa, Pichinde virus
  Amino acid sequence of GP2 Pichinde virus
GFFTWDLSDSTGQHVPGGYCLEQWAIVWAGIKCFDNTVMAKCNKDHNEEFCDTMRLFDFNQNAIKTLQLNVENSLNLFKKTINGLISDSLVIRNSLKQLAKIPYCNYTKFWYINDTITGRHSLPQCWLVHNGSYLNETHFKNDWLWESQNLYNEMLIKEYEERQGKTPLALTDICFWSLVFYTITVFLHLVGIPTHRHIIGDGCPKPHRITRNSLCSCGYYKIPKKPYKWVRLGK

SEQ ID NO: 40 - protein, 234 aa, Junin virus
  Amino acid sequence of GP2 in Junin virus
AFFSWSLTDSSGKDTPGGYCLEEWMLVAAKMKCFGNTAVAKCNLNHDSEFCDMLRLFDYNKNAIKTLNDETKKQVNLMGQTINALISDNLLMKNKIRELMSVPYCNYTKFWYVNHTLSGQHSLPRCWLIKNNSYLNISDFRNDWILESDFLISEMLSKEYSDRQGKTPLTLVDICIWSTVFFTASLFLHLVGIPSHRHIRGEACPLPHRLNSLGGCRCGKYPNLKKPTVWRRGH

SEQ ID NO: 41 - protein, 235 aa, Oliveros virus
  Amino acid sequence of GP2 in Oliveros virus
AFLTWTLSDATGNDLPGGYCLEQWAIVWAGIKCFGNTAVAKCNQNHDSEFCDMLRLFDYNRNAIKSLNDQSQSRLNLLTNTINSLISDNLLMKNKLAEIMNIPYCNYTKFWYINDTRTGRHTLPQCWLISNGSYLNETKFRTQWLSESNALYTEMLTEDYDKRQGSTPLSLVDLCFWSTLFYVTTLFAHLVGFPTHRHILDGPCPKPHRLTKKGICSCGHFGIPGKPVRWVKRSR

SEQ ID NO: 42 - protein, 234 aa, Tamiami virus
  Amino acid sequence of GP2 in Tamiami virus
SFFTWSLSDAVGNDMPGGYCLEKWMLIASQLKCFGNTAVAKCNLNHDSEFCDMLRLFDFNRKAIETLQNKTRSQLNIAINAINSLISDNLLMKNRVKELMDIPFCNYTKFWYVNHTKLNHHSLPRCWLVKNGSYLNESEFRNDWLLESDHLISEILSREYEERQGRTPLSLVDVCFWSTLFYTASIFLHLIRIPTHRHIVGEGCPKPHRLRADSTCACGLYKQKRRPLKWVRSN

SEQ ID NO: 43 - protein, 9 aa, Artificial Sequence
  Peptide epitope derived from P1A
LPYLGWLVF

SEQ ID NO: 44 - protein, 9 aa, Artificial Sequence
  Immunodominant NP-derived backbone epitope
RPQASGVYM

SEQ ID NO: 45 - protein, 9 aa, Artificial Sequence
  Peptide epitope derived from HPV16 E7 protein
RAHYNIVTF

SEQ ID NO: 46 - protein, 9 aa, Artificial Sequence
  Immunodominant NP-derived backbone epitope
FQPQNGQFI

SEQ ID NO: 47 - protein, 8 aa, Artificial Sequence
  NP-derived backbone epitope
YTVKYPNL

SEQ ID NO: 48 - protein, 507 aa, Allpahuayo virus (ALLV)
  Amino acid sequence of glycoprotein precursor (GPC) protein in Allpahuayo virus (ALLV)
MGQVVTFLQSLPEVINEAINIALIAISIICILKGLVNFWKCGVVQLAIFLCLAGRKCDGLMIDRRHELSHVELNLTRMFDNLPQSCSKNNTHHYYKGPKGTTWGIELTLTNTSLDSYANMSRIRSLAFGNITNCDKTGEAGHTLKWLLNELHFNVLHVTRHVGARCRVSEGAGLLIQYNLTIGDHGGEVGRHLIASLAQIIGDNKAAWVGKCDSHCTMDGKCNYTNCEGFTHYNYLIIQNTTWENHCSYSPMSTIRMALNKVAYSSVSRQLLGFFTWDISDSSGAHVPGGYCLEQWAIVWAGIKCFDNAVMAKCNKDHNVEFCDTMRLFDFNQNAIKTLQLNVENSVNLLKRSINGLISDSLVIRNSLKQLAKIPYCNYTKFWYVNDTITGKHSLPQCWLMRNGSYLNETHFKNEWLWESQNLYNEMLLKEYEDRQGKTPIALTDICFWSLVFFTSTVFLQLVGIPTHRHLVGEGCPKPHRITSNSLCACGYYKIPKRPTRWVRKGK

SEQ ID NO: 49 - protein, 561 aa, Allpahuayo virus (ALLV)
  Amino acid sequence of NP protein in ALLV
MSSENVPSFRWTQSLRRGLSNWTHAVKGDVLADARAIVSALDFHQVAQVQRMMRKDKRSEADLTRLRDMNKEVDALMMMRSAQKDNILKVGGLSKDELMELASDLDKLRKKVQRTEGGGQPGVYAGNLTSSQLNQRSEILKMMGMGTGPRGPVGGVVKVWDIKDSSLLVNQFGSMPALTIACMTQQGGEQMNDVVQALTSLGLVYTVKYPNLSDLEKLTEKHPCLKLITQEPAQINISGYNLSLSAAVKADACMIDGGNMLETLQVKPSMFSTLIKTILEVKNREGMFVSPSPGQRNPYENILYKVCLSGDGWPYIGSRSQIKGRAWENTTVDLEGKPSVNHPPVRNGGSPDLKQIPKTKEDEVIRAIEQLDPRGTTWVDIEGPPGDPVELALFQPETGNYLHCYRRPHNENAFKDQSKFSHGLLLKDLADTQPGLISCIIRHLPNNMVLTAQGNDDIIKLLEMHGRRDIKVLDVKLSSDQARLMEDVVWERYNMLCVKHTGLVIKKKKKGAAPGSANPHCALLDCIMFDATVTGYLRDQKPKRLLPLDTLYRDNANLINL

SEQ ID NO: 50 - protein, 95 aa, Allpahuayo virus (ALLV)
  Amino acid sequence of Z protein in ALLV
MGLRYSKEVRDRHGDKDIEGRVPMTLNLPQGLYGRFNCKSCWFVNKGLIACGDHYLCLGCLTRMLSRTDFCEICSKPLPKKIIFEDSPSAPPYEP

SEQ ID NO: 51 - protein, 2201 aa, Allpahuayo virus (ALLV)
  Amino acid sequence of L protein in ALLV
MDVHLIELRDLVRKWVPDDLELSEQKNIMLAQTQIRATVVESLKLLSTIVEVDSCKKHSCVHNTSKTVNAILREHKIIGPTLPDVTPDGYCVIGDVLILLEVFVRTNQESFEKKFNQDFEKLMQMSADLKKCGVTLVPTIDGRSTYYVDFIPDWVVERLRWLISRLMSSLREDGQEIEELEYERLISSLSSLENQSLGLESLLAMREKGLSYKETLDKLFLEGMENKLTVDESRTRIMKMFQIFRTLLESGYLERKYQTTDREDMLKRLRDHEFIVCSKSVEYTFDCPNCSVHLYKVLNLLLNQGSRGAPHQCLGEYMKTLSICNKIKSMKILNTRRNTLLILDTIMLNKFLDLEKVFGHVVVERVMIMQSLMTVNDRLLSIDVLMEMLEKKMTRNPLWFLKVNEKLRKLCPPEVYQSIEEYVHEVDRDHWFELKLTLHQTWPAKPLIDYKGKMRCTCVEKDSNNKNQLSDLTEEKFQLLLKKLSSFCLGITNSLKTSAVAKLRVNQPDDYYGKVTCSEVFFQSLDKEHSAVLLYQKTGEKSRAYGLAFNNVVTGQYTTEASFYCDPKRFFLPIMSDVVLFRMCNEMLSWLDYLSDDVMLEVRTCLYRLVLSILCTPSKRVQVYIQGLRYFIMAFVNEFHCTGLLDKLKVTALTESERYCMKLCDDLVVKVLNSVEDENMAKAFKFVLNTSYLCHLITKETPDRLTDQIKCFEKFLEPKLDFGSVIVNPDSSCELTAGQEEQFYQGLEKLFTDKKLESSYANKPGVCKEVLNVCMSLFNSGALEVKPLLNHDPITPSFTSTALDLSSNKSVVVPKLDELGEVLTEYDYSKLVSSVVVDLVEHFKTKGKYVVSPRSLQYKIYKRLSNLVQQRAGKGNKESELTEEEFLEQVTAEQLEVINKVETKVSRTLSGIKLSSDTENAKHDDDYHLKKLWSKDIMVRIKAETSLHEVKDFNVDTLPFDLYRELVDAIYNDPAANSHYFSERIFNPCPLELLIKNLTLKAYKEEDFFECFKYILISSNFDNKVGKYDHKNRSRLGLSSAALLVKDEARISMRESNSESIAKRLDKSFFTNSSLRNLCFYSDESPTERTSVSSNVGKLKFGLSYKEQVGGNRELYVGDLNTKLTTRLVEDYAESLTSDMKYTCLNNENEFERALLDMKSVVRQSGLAVSMDHSKWGPHMSPALFSLMLRGLDFRLKDGTLIDKEAVVNILSWHIHKMVEVPFNVVEAYLKGFIKRGLGLMDRGGATRVEEFMFGYFDQGIVPSHISSVIDMGQGILHNLSDLYGLITEQFIVYALDLCYSSSFMAYTSSDDEILLSISNSFKRNDGSMDMDLAIEALEFHYFLSDRLNKFVSPKTVAGTFASEFKSRFFIWSQEVPLLTKFVAASLHNVKAKAPSQLAETIDTILDQSVANGVSIEIIGAIAPRTNALITYSGHPFNLFLCLEETDVRDWVDGSRGYRLQRSIENAFPDDVLPEIIRSACRKIFYRIQSGTLEEDYIVTTLQQSPDDCLKQMLTSCDVEKEAIDDICNYRWLNLRAHGDLRLVLRTKIMTSTRTLQKEEVPSLIKSVQSKLSKNFVRGAKKILADAINKSAFQSCISSGFVGVCKSMGSKCVRDGKGGFKYIKDILKEIKHHEKPDCHFCKELKGIYCSELLENISEFSRPLFWDYFSLVLSNACELGNWVFCKIEIPKSVYHLNNPNHFWPIKPSSHAELEEKVGMNHVLYSIRRNFPVLFDEHISPYLSDLNMLKLNWVQKIRFLDICVAIDMTSECLGIISHIIRRKREELYIVKQSELSMSHTRVSLPLERGFNIEPDEVCHNFLLQILFESMIHPVLLTTSQFKRYFWYSEVELLPKEALHDLGQFTQFIIDCKVLNSSRAMCLDDLDVGYVSSKVKRTDTYLNLSTFMTNLDWENRHEYSSFEDLILSSPSEVFLFEITFTFSHIRRSHKFRYDRSTNYILKTKLVIEKSELVNGEDGVYCVTPHSIEYYVSQSSGNHISLDGVSLLVLDPLISGRELVNMDELLQNQDVTFSAPSQILSKIKLDFKPFTKEIKNKFSYKLIGPDVDMSPLHLDKGAIKEGDRIVSQIEIQVSFKSVITAIELLDEDQRKIFVGNLFVYLTSLKSVNRALSMSESDLRLLVENYPSVIEYMLSGCDGWLNCGSFSLIKSKTLQCIMLADERGPYRIKGQNCRRLFPTEEAIEIE

SEQ ID NO: 52 - protein, 491 aa, Mobala virus (MOBV)
  Amino acid sequence of glycoprotein precursor (GPC) protein in Mobala virus (MOBV)
MGQIVTFFQEVPHIIEEVMNIVLITLSLLAILKGIYNVMTCGLIGLLTFLFLCGKSCSTIYKDNYRLMQLNLDMSGLNATMPLSCSKNNSHHYIQVFNTTGLELTLTNDSLIGHKWCNLSDAHKKDTYDHTLMSIISTFHLSIPNFNHYEAMACDFNGGKISIQYNLSHSSETDAMNHCGTVANGVLEVFRRMTWCTHCDTPLGASIAGFNCVRTSYKYLIIQNTTWEDHCTMSRPSPMGYLSLLSQRAREIYISRRLMGTFTWTLSDSEGNDLPGGYCLQRWMLIEAEMKCFGNTAVAKCNQQHDEEFCDMLRLFDFNKEAIHRLRVEAEKSISLINKAVNSLINDQLIMRNHLRDIMGIPYCNYSRFWYLNDTRSGRTSLPKCWMVSNGSYLNETHFSSDIEQEANNMITEMLRKEYERRQGTTPLGLVDLFVFSTSFYLISVFLHLIKIPTHRHLVGKPCPKPHRLNHMGVCSCGLYKQPGLPTKWKR

SEQ ID NO: 53 - protein, 58 aa, Mobala virus (MOBV)
  Amino acid sequence of GP signal peptide in MOBV
MGQIVTFFQEVPHIIEEVMNIVLITLSLLAILKGIYNVMTCGLIGLLTFLFLCGKSCS

SEQ ID NO: 54 - protein, 201 aa, Mobala virus (MOBV)
  Amino acid sequence of GP1 protein in MOBV
TIYKDNYRLMQLNLDMSGLNATMPLSCSKNNSHHYIQVFNTTGLELTLTNDSLIGHKWCNLSDAHKKDTYDHTLMSIISTFHLSIPNFNHYEAMACDFNGGKISIQYNLSHSSETDAMNHCGTVANGVLEVFRRMTWCTHCDTPLGASIAGFNCVRTSYKYLIIQNTTWEDHCTMSRPSPMGYLSLLSQRAREIYISRRLM

SEQ ID NO: 55 - protein, 232 aa, Mobala virus (MOBV)
  Amino acid sequence of GP2 protein in MOBV
GTFTWTLSDSEGNDLPGGYCLQRWMLIEAEMKCFGNTAVAKCNQQHDEEFCDMLRLFDFNKEAIHRLRVEAEKSISLINKAVNSLINDQLIMRNHLRDIMGIPYCNYSRFWYLNDTRSGRTSLPKCWMVSNGSYLNETHFSSDIEQEANNMITEMLRKEYERRQGTTPLGLVDLFVFSTSFYLISVFLHLIKIPTHRHLVGKPCPKPHRLNHMGVCSCGLYKQPGLPTKWKR

SEQ ID NO: 56 - protein, 568 aa, Mobala virus (MOBV)
  Amino acid sequence of NP protein in MOBV
MSNSKEIKSFLWTQSLRRELSGFCTNTRVQVIKDAQSLLHGLDFSEVSNIQRLMRKEKRDDSDLKRLRDLNQTVNNLVELKSSQQKNTLRVGALTSDDLLVLAADLDRLKAKVNRSERPLTGGVYMGNLTQQQLDQRKILLQLVGMGGSRVPPRGGDGIVRVWDVRNPDLLNNQFGTMPSLTLACLCKQGQEDLSDVVKALTDLGLVYTAKYPNLSDLDKLTHTHPVLGLIDGNKSAINISGYNFSLNAAVKAGASLLDGGNMLETIKVTPKNIDTILKCVLKVKRSVGMFVSDTPGERNPYENILYKICLSGDGWPYIACRTSISGRAWDNTEVDLGTNKDPINKGPPTSNKTAGAAGFNAGLTYSQMMELKDSMLQIDPTAKTWVDIEGRADDPVEIAIYQPSNGHYIHFYREPTDIKQFRQDAKYSHGIDVQDLFTTQPGLTSAVLENLPKNMVLTCQGVEDIRKLLDSQGRKDIKLIDVSMQKADARKFEHQIWDEYKHLCSMHTGIVVEKKKRGGKEEITPHCALLDCLMFEATTRNSLDIVIPRPVLSKDLVFRSATPKVIL

SEQ ID NO: 57 - protein, 99 aa, Mobala virus (MOBV)
  Amino acid sequence of Z protein in MOBV
MGQKPSKPKAPPTTYESPRSSLTPDATGFGPEFCKSCWFERKGLIKCQNHYLCMTCLTLLLTVSNRCPVCKYPLPTKLRLEKSPTAPPPEATNPPPYSP

SEQ ID NO: 58 - protein, 2220 aa, Mobala virus (MOBV)
  Amino acid sequence of L protein in MOBV
MEEQISEVKDIISKYLSNDDRLAKQKLAFLVQSEPKLLLIEGLKLLSLCIEIDSCEANGCDHNTKELSVENFLSENRVLCPGLPMVVPDGFKLNGNVLMILECFVRSSPANFEQKYREDLVKLNSLKEDLMTVGITMLPLIDGRTNFQTDRLPEWANERFRTLLFSLLAFSQESSRMFEEAEYSRLCESLNVSGGKRSGIENINILSDHRSEHFDELLKLCHVGINNHMSSLDVKREIIQEFQAFRNKLQNGVIERQFLRVNREELIKAFNEMYTLRVGDKPELLDSLLNDYYHSCPLITMLYCELPNGKSCQSDISHVRGWRSLLNKVKSLRLINTRRKLMLIFDSILLLAHMKDLSVNGHLVESEWMGSSFLSVNDRLVSLPATQKDLKTWLQRRTNRLSHSHQSQSAYEVFSTMVNRVLNKAKEVLLLVNLTFKDYNVDEDILSESSFTEMMSLEVNGVEPTINYEKNPIDRFSYNIQAMDPDNQSDLKRLSSISLALVNSMKTSSTVKLRQNEHGKLRYKCVRCKEAYYQDFLIEGHRLMLIYQKTGECSKCYSVNDAVVGELCSFYADPKRYFPAIFSDSVLQEMIDTMISWLTECSELKEFIKEIKSLLKMVVMVVLTNPTKRIQKFLQNLRYFTMAYVSEYHHKDLLEKLREDLITNCEFLLYRITRSILNIVFNVNVTTMITNRFKFILNLSYLCHLITKETPDRLTDQIKCFEKFIEPKMKFDSVNVNPLEPADQEELRSLLMSADKFLSKPDCFGDEGILFKTPGVSRKIFSMMVSSFNNGSLFKQAELKNGVKDPLVVSGCATALDLASNKSVVVNKYTDGDRIIEYDYDKLVATAVCQLSEVFSRKGKYVLSKEDYDFKIQQIMSDLVIGRSKLHGSEIGLNSCEEVDEVLIEGGAADYFDSIKQSVDTVMSKFSWSGSESSATLKSECSIDDLSLALQDKAQLRLIRNELSCHMVEDFDVMTLPYDTYEEICKSVYSDPSLRSKYFYLESLESCPLTKMAQAVCTRTFHDEEYFQCFKSLLLQMNANKLSGKFNHYKSKCLNFKLDRDRLFNETRISERESNSEALSKALSLTNCTTAALKNLCFYSQESPQSYNSQGPDTGRLKFSLSYKEQVGGNRELYIGDLRTKMFTRLIEDYFEALTSQFKGSCLNDEHEFENAVFSMKFNVSLGLLSYSLDHSKWGPMMTPFLFLATLQNINWPSLDTLSDAKSRDYVSSMLSWHIHKLVEVPFNVVTAMMKSFIKSKLGLKKNLSETMTERFFFEHFRLGKVPSHISSILDKGQGILQNTSDFYGLISERFINYCISCLYEGNVDAFTSSDDQISLFDKSLSDLLEKDPDEFEYILEFHNYLSDQLNKFISPKSVKGNFAAEFKSRFFVWGDEVPLLTKFVAASLHNIKCKEPHQLAETIDTIIDQAVANGVPVKLCNIVQERTLNLLRYAQYPIDPFLMFCSSDVKDWVDGNRGYRIMRNIEMLEPNGTRKVRSFLRRLYNNLKTGLLHEEFTAAYLSGDPYQSLAKLSKIFDTEILNDEELGLSWLNLSAYYPLRMVLRQKVIYTGAVNVEEEKLPTIVKTLQNKLSSNFTRGAQKLLSEAINRSAFQSCIASGFVGLCRTLGSKCVRGPERENFYIKSIMNQSMMMEGVSRELVMGVDVWRVRNPLDNSRAQQKWGNYFRPILWDYLCIALSTALEIGSWVLGEPKLKSPLPQMKFRPCDYFPMKPSVTRLLEDKVGFNHIIHSFRRLYPDIFEKHLLPFMSDLASTKMKWSPRVKFLDLCVMLDVNCEAMSLVSHIVKWKREEHYVILSDELSISHDRSHESLADERVVSTEDVSENFLRQIYFESFARPFVATSRTLGSFTWFPHKTSLPESEGLASLGPFGTFIEKVIFKGIERPMYRHDLFSGYAWLDFDFGEFYINSSKLIQYGLTEMRYFEDLSEFMSMLSSLKPGSIEISLTVNFQVKSQGESLREKFFIHCKFYGSFDVDGKFEFNNIGVQYSGAINRSAVLDCWRLILTNSHFLGDKVIWHLNTANIKDYLKDGSMVGEVVPIEVIINRDALRLDTLDFERVGPDVNVVPLVVKDGYIFEGDKKLVPFNPSIHDQDFEILVKELCIDDKELLKDMIQKMITVRGSQGLQWHSLDIVAVLTKNMPTNYKDFITESLSVLDSWTGFKGYSLCFSKTKNTLMIHTSEGNLRLKGKLCRKLFDDPVHVEDIE

SEQ ID NO: 59 - protein, 489 aa, Mopeia virus (MOPV)
  Amino acid sequence of glycoprotein precursor (GPC) protein in Mopeia virus (MOPV)
MGQIVTFFQEVPHILEEVMNIVLMTLSILAILKGIYNVMTCGIIGLITFLFLCGRSCSSIYKDNYEFFSFDLDMSSLNATMPLSCSKNNSHHYIQVGNETGLELTLTNTSIIDHKFCNLSDAHRRNLYDKALMSILTTFHLSIPDFNQHEAMSCDFNGGKISVQYNLSHSNYVDAGNHCGTIANGIMDVFRRMYWSTSLSVASDISGTQCIQTDYKYLIIQNTSWEDHCMFSRPSPMGFLSLLSQRTRNFYISRRLLGLFTWTLSDSEGNDMPGGYCLTRSMLIGLDLKCFGNTAIAKCNQAHDEEFCDMLRLFDFNKQAISKLRSEVQQSINLINKAVNALINDQLVMRNHLRDLMGIPYCNYSKFWYLNDTRTGRTSLPKCWLVTNGSYLNETQFSTEIEQEANNMFTDMLRKEYEKRQSTTPLGLVDLFVFSTSFYLISVFLHLIKIPTHRHIKGKPCPKPHRLNHMAICSCGFYKQPGLPTQWKR

SEQ ID NO: 60 - protein, 58 aa, Mopeia virus (MOPV)
  Amino acid sequence of GP signal peptide in MOPV
MGQIVTFFQEVPHILEEVMNIVLMTLSILAILKGIYNVMTCGIIGLITFLFLCGRSCS

SEQ ID NO: 61 - protein, 199 aa, Mopeia virus (MOPV)
  Amino acid sequence of GP1 protein in MOPV
SIYKDNYEFFSFDLDMSSLNATMPLSCSKNNSHHYIQVGNETGLELTLTNTSIIDHKFCNLSDAHRRNLYDKALMSILTTFHLSIPDFNQHEAMSCDFNGGKISVQYNLSHSNYVDAGNHCGTIANGIMDVFRRMYWSTSLSVASDISGTQCIQTDYKYLIIQNTSWEDHCMFSRPSPMGFLSLLSQRTRNFYISRRLL

SEQ ID NO: 62 - protein, 232 aa, Mopeia virus (MOPV)
  Amino acid sequence of GP2 protein in MOPV
GLFTWTLSDSEGNDMPGGYCLTRSMLIGLDLKCFGNTAIAKCNQAHDEEFCDMLRLFDFNKQAISKLRSEVQQSINLINKAVNALINDQLVMRNHLRDLMGIPYCNYSKFWYLNDTRTGRTSLPKCWLVTNGSYLNETQFSTEIEQEANNMFTDMLRKEYEKRQSTTPLGLVDLFVFSTSFYLISVFLHLIKIPTHRHIKGKPCPKPHRLNHMAICSCGFYKQPGLPTQWKR

SEQ ID NO: 63 - protein, 570 aa, Mopeia virus (MOPV)
  Amino acid sequence of NP protein in MOPV
MSNSKEVKSFLWTQSLRRELSGYCSNIKIQVIKDAQALLHGLDFSEVANVQRLMRKEKRDDSDLKRLRDLNQAVNNLVELKSVQQKNVLRVGTLTSDDLLVLAADLDRLKAKVIRGERPLAAGVYMGNLTAQQLEQRRVLLQMVGMGGGFRAGNTLGDGIVRVWDVRNPELLNNQFGTMPSLTIACMCKQGQADLNDVIQSLSDLGLVYTAKYPNMSDLDKLSQTHPILGIIEPKKSAINISGYNFSLSAAVKAGACLIDGGNMLETIKVTKSNLEGILKAALKVKRSLGMFVSDTPGERNPYENLLYKLCLSGEGWPYIASRTSIVGRAWDNTTVDLSGDVQQNAKPDKGNSNRLAQAQGMPAGLTYSQTMELKDSMLQLDPNAKTWIDIEGRPEDPVEIAIYQPNNGQYIHFYREPTDIKQFKQDSKHSHGIDIQDLFSVQPGLTSAVIESLPKNMVLSCQGADDIRKLLDSQNRRDIKLIDVSMQKDDARKFEDKIWDEYKHLCRMHTGIVTQKKKRGGKEEVTPHCALLDCLMFEAAVIGSPQIPTPRPVLSRDLVFRTGPPRVVL

SEQ ID NO: 64 - protein, 103 aa, Mopeia virus (MOPV)
  Amino acid sequence of Z protein in MOPV
MGKTQSKGQPSTNLLKETEPRHPVIPDARGTGPEFCKSCWFERRGLVRCNDHYLCLNCLTLLHTVSDRCPICKHKLPFRLELQTQPTAPPEIPPSQNPPPYSP

SEQ ID NO: 65 - protein, 2237 aa, Mopeia virus (MOPV)
  Amino acid sequence of L protein in MOPV
MEELLSESKDLVSRYLLEDERLSKQKLAFLVQTEPRMLLIEGLKLLSLCIEIDSCKANGCEHNSEDLSVEILLQRQGVLCPGLPFVVPDGFKFSGNTLILLECFVRTSPINFEQKYKEDTIKLESLKPDLSSVDIILLPLIDGRTNFYTDLFPEWANERFRHILFSLLEFSQQSSKMFEESEYSRLCESLTKAGVRTSGIESLNVLTDSRSDHYERVLELCHRGINNKMSILDVKKEIVSEFHAFRNKLKEGEIERQFVRTDRRQLLRDFNNLYIDREGDTPSEIDPLKERFVKSSPMVTALYGDYDRYRQEGVDRDSCLQNHFQSSVPGWKSLLNKIKSLKLLNTRRKLMLTFDAIILLAHLKDLKCHGELLGSEWLGSSFLSVNDRLVSLQETQKDLKKWIERRMVSAMKKKGGVGTLCQRSELIFFDIINKLLTKAKEALSSASLCFRDYVKEEDILEEDSYERLMLMEKRGIQPTMSYEKEEGNQFPYPLIELEADSIEDLRRLSSISLALVNSMKTSSVAKVRQNEYGAARYKRVRCKEAFNQSFIMGSGNFNLIYQKTGECSKCYAINNPEKGEICSFYADPKRFFPAIFSHCVIYETINTMMSWLSECIELRDQQKTLKLLLKITMILILVNPSKRAQKFLQGLRYFIMAFVSDFHHKQLMEKLREDLITEPEHLLYSVVRSILNIILGEGVSTMLTNRFKFVLNLSYMCHFITKETPDRLTDQIKCFEKYLEPKLEFDSININPSEEGDEDERMLLLESANKFLSKETSMSNNRISYKVPGVSRKFFSMMTSSFNNGSLFKKGDDLSGFKDPLVTAGCATALDLASNKSVVVNKYTDGERILYYDHDKLVAASVCQLSEVFQRKTKYLLSKEDYDYKVQKAISDLVVGKKSGSSNPNSQGAPDELDELFLDSCALDCLEDVKKSVDVVLEKYRYDRKFPVGNGSEEKSLTDLRKVLGTEDVGCVYYRLIQAEIAHHMVEDFDESLLPGDAYEMICKGFFKDLELRSKYFYLDSLDSCPITCITQAVSTRTFNDQQFFQCFKSLLLQMNAGKLAGKYSHYKNKCLNFKIDRERLMNDVRISERESNSEALGKALSLTNCTTAVLKNLCFYSQESPQSYTSLGPDTGRLKFSLSYKEQVGGNRELYIGDLRTKMFTRLIEDYFEALTKQYRGSCLNNEKEFHNAILAMKLNVSLGQVSYSLDHSKWGPMMSPFLFLVFLQNLRWETRDDIEDIKSKDYVSTLLSWHIHKLIEVPFNVVNAMMRSYLKSRLGLKKSLHQTSTEAFFFEYFKQNRIPSHLSSIIDMGQGILHNASDFYGLVSERFINYCIKCLFEDEVDSYTSSDDQISLFGKDLSDLLSNEPEEFQAILEFHYFLSDQLNKFISPKSVIGSFVAEFKSRFYVWGDEVPLLTKFVAAALHNVKCKEPHQLAETIDTIIDQSVANGVPVTLCNAIQERTLNLLRYAQYPIDPFLLFLDSDVKDWVDGNRGYRIMRNIEAILPESTQKVRKVLRTVFNKLKLGELHEEFTAIYLSGDPADSFKKLTSLVGDDTLSEEDLSVCWLNLTTHHPLKMVMRQKVIYTGAVELGEEKLPTLVKTLQSKLSSNFTRGAQKLLCEAVNKSAFQSGIASGFIGLCKTLGSKCVRFSDRSTAYIKSLVSRLSALDSVSSLKVKGVDLWILGKEHTKAAEEALGFLRPVLWDYFCIALSTSLELGSWVLGEPKVKEKTSSIPFKPCDYFPMKPTTTKLLEDKVGFNHIIHSFRRLYPSLFERHLLPFMSDLASTKMRWTPRIKFLDLCVVLDVNCEAMSLISHVVKWKREEHYVVLSSDLAIAHERSHLPITDERVVTTYDVVQNFLRQIYFESFIRPFVATSRTLGSFTWFPHRSSIPESEGLDNLGPFSSFIEKVIYKGVERPMYRHDLYSGYAWLDFECAPAILNLGQLIASGLTEQHVFESVSELLEAFADLSVGSVQISVTVNFQVRSQGESLKEKFSLHLLFKGVVLEGGLFKPHSLDVTYSGSVQRSAIKDCWRVAQTSTWFKRETTSIWLLSTENICDYLRDSSPIPDVIPLSVLLNEEILDLEEHDFTHIGPEHVEIPLVVDSGYLIEGTRKLLPFNPNIHDQDLNVFIGELMEDHSEILERSLSKMLRSRMDQGLHWLQLDIIGVVGRCMPEGYENFLTRVFSGIDFWADFKGYSLCYSRSQASLMIQSSEGKFRLRGRLCRPLFEEVGPPLDIE

SEQ ID NO: 66 - protein, 495 aa, Ippy virus (IPPV)
  Amino acid sequence of glycoprotein precursor (GPC) protein of Ippy virus (IPPV)
MGQIITFFQEVPHIIEEVMNIVLITLSLLAILKGVYNVMTCGLIGLISFLLLCGKSCSLIYKDTYNFSSIELDLSHLNMTLPMSCSRNNSHHYVFFNGSGLEMTFTNDSLLNHKFCNLSDAHKKNLYDHALMGIVTTFHLSIPNFNQYEAMACDFNGGNISIQYNLSHNDRTDAMNHCGTVANGVLDAFYRFHWGRNITYIAQLPNGDGTGRWTFCYATSYKYLVIQNISWADHCQMSRPTPIGFASILSQRIRSIYISRRLMSTFTWSLSDSSGTENPGGYCLTRWMLFAADLKCFGNTAIAKCNLNHDEEFCDMLRLIDFNKQALKTFKSEVNHGLQLITKAINALINDQLIMKNHLRDLMGIPYCNYSKFWYLNDTRTGRVSLPKCWMISNGTYLNETHFSDEIEQEADNMITEMLRKEYQERQGKTPLGLVDLFIFSTSFYSITVFLHLIKIPTHRHIVGQGCPKPHRLNSRAICSCGAYKQPGLPTKWKR

SEQ ID NO: 67 - protein, 58 aa, Ippy virus (IPPV)
  Amino acid sequence of the GP signal peptide of IPPV
MGQIITFFQEVPHIIEEVMNIVLITLSLLAILKGVYNVMTCGLIGLISFLLLCGKSCS

SEQ ID NO: 68 - protein, 205 aa, Ippy virus (IPPV)
  Amino acid sequence of GP1 of IPPV
LIYKDTYNFSSIELDLSHLNMTLPMSCSRNNSHHYVFFNGSGLEMTFTNDSLLNHKFCNLSDAHKKNLYDHALMGIVTTFHLSIPNFNQYEAMACDFNGGNISIQYNLSHNDRTDAMNHCGTVANGVLDAFYRFHWGRNITYIAQLPNGDGTGRWTFCYATSYKYLVIQNISWADHCQMSRPTPIGFASILSQRIRSIYISRRLM

SEQ ID NO: 69 - protein, 232 aa, Ippy virus (IPPV)
  Amino acid sequence of GP2 of IPPV
STFTWSLSDSSGTENPGGYCLTRWMLFAADLKCFGNTAIAKCNLNHDEEFCDMLRLIDFNKQALKTFKSEVNHGLQLITKAINALINDQLIMKNHLRDLMGIPYCNYSKFWYLNDTRTGRVSLPKCWMISNGTYLNETHFSDEIEQEADNMITEMLRKEYQERQGKTPLGLVDLFIFSTSFYSITVFLHLIKIPTHRHIVGQGCPKPHRLNSRAICSCGAYKQPGLPTKWKR

SEQ ID NO: 70 - protein, 570 aa, Ippy virus (IPPV)
  Amino acid sequence of nucleoprotein of IPPV
MANSKEVKSFLWTQALRRELGQYCSTVKSSIIKDAQSLLHSLDFSEVSNIQRLMRKDKRNDSDLKRLRDLNQAVFNLVELKSTQQKNVLRVGKLTSDDLLVLAADLDRLKNKVMRTERPQTLGVYMGNLTNQQLDQRKRLLDMIGISNARNAPRPGADGVVRVWDVKDSSLLNNQFGTMPSLTLACMSKQGQYELNDVVQSLTDLGLVYAAKYPNAMDLEKLTQAHPVLSIIDVSKSSINVSGYNFSLSAAVKAGACMLDGGNMLETLKVTPQNLEDILASMLKVKRAHSMFVSDTPGDRNPYENLLYKVCLSGNGWPYIACRTSLTGRAWDNTVVDLGPPIDLSQNKQMSPAKPKGAGHGMPSGLTMSQILALKDLMAAVDPNAKTWIDIEGRAEDPVEIAFYQPQTGAYIHFYREPTDAKQFKQDSKYSHGIDIGDLFNVQPGLTSAVLELLPPNMVLTCQGSEDIRRLLDSQGRKDIKLIDVLMSKSEARKFEDEVWDKFGFLCKIHTGHVVEKKKRGNKEEITPHCALLDCLMYEAASTGRFSPGSIRAVLPRDMVFRAVTEKVAL

SEQ ID NO: 71 - protein, 89 aa, Ippy virus (IPPV)
  Amino acid sequence of Z protein of IPPV
QCQAVHAKVVIVTSNKTPTLKPAALAKLWPHACCIWNDVCSVPCVFGLILDGLLFVSALVLSHAGLGDGLAIWRDCWRVLVGVVVAGLV

SEQ ID NO: 72 - protein, 2208 aa, Ippy virus (IPPV)
  Amino acid sequence of L protein of IPPV
MEESLRETKLLISRYLRQDERIARQKLAFLGQSEPRSLLIEGLKLLSLCIEIDSCDTNCCTHNTEGQSVENFLFQNHILCPSLPLVVPDGMKLNGNILIILECFVRSNPTNFQQKYQEDSVKLDSLKGDLERAGISLIPIIDGRTSYYNSLMEEWVCDQFRHNLFKLLEFEQENNALFEESEYLRLCESLNVSGGRASGAQGLHSLLDCRGEHYNEILKACHIGIDPSIGGVELKGQIENLYQVFRQKLKKGVIKHQFRKVDQKSLLKEYCEMYKGIGICGVEETTVDALAAELPNISPILRYIHLRIDSESNAEVNEISNLPTGLRSAFNKVKSLKVLNTRRKLLLLIDTIILMSHCYVRELFPTLCERDWLGSSFFSVGDRLVSVGAIQHDLSKWLKRRLKANGGVGQKSTELHKMINTMIQKSSKALGDVGLSFESYGVSFDFLNKVGLEEIMRFKIVGVTPTISYIKTNQQPPIPLREFSAEDDSDLKMLSSLSLSLVNSMKTSSTVKTRQNAMGRERYRVVQCKECYYQELGNEYRDLVLLYQKTGEGSKCYSVNSKRVGEICSFYADPKRYFCPIFSENVITKVIDTMMTWLMGIVELEDSLRDIKKLTKMILLVILCQPSKRSQKLLQNLRYFIMAFVSDYHHVELFDKLREELITDAEFFLFKLLGKILTILLNDEVSTMLNNRFKFILNISYFCHFITKETPDRLTDQIKCFEKYLEPKIQFGSLTVNPKETPTDEEKDDILHGVNMFLSKKTCDEVDDPPSKKPGVSKKVFSLMLSAFNSGLLFKESELKKGMKDPLEDSGSATALDLASNKSVVINKYTKDGRVLDYNYDKLVSVAVCQLSEIFSRKGKYLLNKEDYDYKIQEVLSSLVIGSSKSEQPEEILDVDSDYMDQLKASVERVLDQYKPNRGVRSQNNDKSVNDLKIIVEDELSRRLILGELSYHLVEDFDKGLLSENFYKEVCEKAFNNKDFRTKYFYDSEAGLCPIEKMTQALATRTYMSGEYFHCFKSLLLQMDANKLSGKYSHYKSQNLNFRFDHGRLMDDSRISERESNSEALSKALSLVNCLTSALKNLCFYSQESPSSYTETGPDTGRMKFSLSYKEQVGGNRELYIGDLRTKMFTRFVEDYFESYTKQLEGSCLNNEKEFEKAILGMKLGVSLAHASYSLDHSKWGPMMCPFLFLMLYRNLSPKLKGTEVELKGCDNISTILSWHIHKLVEVPFNVVTAMMRSYIKRKLGIMKDTSQTITESLFFSEFERGVIPSHFSSVLDMGQGILHNTSDFYGLISERFINYALRLVSGNPIEAYTSSDDQISLFSHKFTELMDTDPEEFLIYLEFHNYLSSLLNKFISPKSVVGRFVAEFKSRFYVWGDEVPLLSKFVAASLHNIKCKEPHQLAETVDTIIDQAVANGVPVSVCNEVQKRTLRLLEFSKYPIDPFLLHSDSDVKDWVDGNRGYRIMRVIEQTLPEGTASVRSLLRILYNKLKSNELHEEFASAYLSQNRSETLVGLAELMGVKPPSTEDLMICWLNLTACHPLRMVLRQKVIYPSALNLEEEKVPTLIRTLQNKLSSGFTRGAQKLLSEAVNKSAFQSSIASGFVGLCKTLGSKCVRDPERESHYIKSIIQYLQTHCNVKPLNKGHLNLWVYESKTDDTQSASVKPWQIELLRPLLWDYLCIALSTSLEIGPWVLGEPVFKVKSDFWKPRPCDYFPLRPAHNRILEDRIGMNHIIHAVRRLYPEMFEKHLLPYMSDLAAMKLKWSPRIKFLDLCVTLDVNCEALSLISHVVKWKREEHYIVLSDDLLVSHDRKHTTLMDETVVSTSDVADNFLKQIYFESFVKPFVATSRTLGSFSWFPHRSSLPQGEGIERLGPFSTFIEKVVFKGIERPMYRYDLFMGYSWLDYEIELAHLNQSQLIASGLTEESCFEDVDQFWHYLSTLKVGSVKLSKTVRLTQKTQGKLQGQKFSVHLNFTGFITNSCTFVPKQLEVLYSGPVDEHFVIDCWSLLKSDREFKAGASEWFVHSDVVDAYISTASPSSEAYPLDVWLEPDLLELSVSDISKVGPEVNIVPLVVEDGHLLELKEKVAIINPVILDQDIEVFINELKEDHWDLLVCKFADILKHRQCCNLYLINVDILTIALRILNDKAEEFISKSMQEIDQWFDFKGYSLCFSKSRRQVMRHSSTGTMRLKGRLCQPAFYVEVVEEID

SEQ ID NO: 73 - protein, 481 aa, Amapari virus (AMAV)
  Amino acid sequence of glycoprotein precursor (GPC) protein in Amapari virus (AMAV)
MGQLVSFFQDIQLFFQEALNVALAVVTVLAIIKGLVNLWKSGLFQFLFFLILAGRSCSFRIGHHTTFESVTMSVGGVFHELPALCRINNSHSLIQLSHNSSLALSVEYVDLCVVLESDQYLVAGDYSNCTGEATGYNWVIDWTLKGLGHGLEGDPKLHCQPKRSTNAEFTLQLNISRRHTNDHYRERIETGIRHMFGPFKILTKEGKDCVILRNTTWKEQCVKSHYNTLAFLLKNTANSLPKRRPLAFFSWSLSDSSGNDMPGGYCLEEWMLIAAKLKCFGNTALAKCNLNHDSEFCDMLKLYEFNKNAISKLNNQTREAVNALTHSINSLISDDLLMKNKLREFLKVPYCNYTKFWYVNHTKSGEHSLPKCWLVNNGSFLNESEFRNEWILESDHLIAEILSKEYQDRQGKTPITLVDMCFWSAIFFDNKSLLHLVGFPTHRHIVGEACPLPHKINRHGACACGLYQKLKKKTAWRKRHQ

SEQ ID NO: 74 - protein, 58 aa, Amapari virus (AMAV)
  Amino acid sequence of GP signal peptide in AMAV
MGQLVSFFQDIQLFFQEALNVALAVVTVLAIIKGLVNLWKSGLFQFLFFLILAGRSCS

SEQ ID NO: 75 - protein, 188 aa, Amapari virus (AMAV)
  Amino acid sequence of GP1 protein in AMAV
FRIGHHTTFESVTMSVGGVFHELPALCRINNSHSLIQLSHNSSLALSVEYVDLCVVLESDQYLVAGDYSNCTGEATGYNWVIDWTLKGLGHGLEGDPKLHCQPKRSTNAEFTLQLNISRRHTNDHYRERIETGIRHMFGPFKILTKEGKDCVILRNTTWKEQCVKSHYNTLAFLLKNTANSLPKRRPL

SEQ ID NO: 76 - protein, 235 aa, Amapari virus (AMAV)
  Amino acid sequence of GP2 protein in AMAV
AFFSWSLSDSSGNDMPGGYCLEEWMLIAAKLKCFGNTALAKCNLNHDSEFCDMLKLYEFNKNAISKLNNQTREAVNALTHSINSLISDDLLMKNKLREFLKVPYCNYTKFWYVNHTKSGEHSLPKCWLVNNGSFLNESEFRNEWILESDHLIAEILSKEYQDRQGKTPITLVDMCFWSAIFFDNKSLLHLVGFPTHRHIVGEACPLPHKINRHGACACGLYQKLKKKTAWRKRHQ

SEQ ID NO: 77 - protein, 560 aa, Amapari virus (AMAV)
  Amino acid sequence of NP protein in AMAV
MANSKEIPSFRWTQALRRELGSFTEPTKGSVLKDAKLIADSLDFTQVSQVQRLLRKTKRTDADLDKLRDLNKEVDKLMSMKSAQRNTVLKVGDLGKDELMDLASDLEKLKRKIGERPNGGPRLYMGNLSQSQLDKRSDILRSLGFQQQRGPNQGIVRLWDVSDPSKLNNQFGSMPALTIACMTVQGGETMNNVVQALTSLGLLYTVKYPNLDDLEKLTVEHDCLQIITRDESALNISGYNFSLSAATKAGASLIDGGNMLETIKVTPDNFSSIIMATLKVKKREGMFVDEKPGNRNPYENLLYKLCLSGEGWPYIGSRSQIVGRSWDNTSVDLNTKPTVGPRGPERNGQNMRLSNLSELQEAIVREAMQKLDPSNTIWMDIEGPPTDPVELAVLQPSTGYYIHCYRKPHDEKGFKNGSRHSHGILLKDLEDAQPGLLSYIIGLLPQNTVITVQGADDIKRLFDIHGRKDLKLVDVRLTGEQSRIFEQEVWERYGELCKAHNGVIVPKKKHKDNGPQKEPHCALLDCIMFQSVLDGHLPELSLKPLLPGSLVYQARNAFVM

SEQ ID NO: 78 - protein, 95 aa, Amapari virus (AMAV)
  Amino acid sequence of Z protein in AMAV
MGNCNVKQETQPQSTRPKTTSTETELLRTPPVSLHGRYNCKCCWFADKNLVVCSDHYLCLRCLNLMLRTSDLCNICWKPLPTRIAIPVEPSAPPE

SEQ ID NO: 79 - protein, 2193 aa, Amapari virus (AMAV)
  Amino acid sequence of L protein in AMAV
MDEKINSLKDFVRKQVPEIPELSYQRELLLSQVEMGMILMEGFKLLSCLVEIESCKKNSCEHNSSQKFVDVILSDNGVVTPTLPKVIPDGFRFFNKTLILLETFVRVNPEEFEKKWKRDMSKLLTLKEDVQKAGITLVPIVDGRCNYNTNLMPDWATERFRWLLIDLLRESRGDSKIDIEEQEYQRLVHSLSKTGNQSLGFENIECLKRHCLNYESRLDESLLTGFNNDLRESKIREGLIKMKNWYRKEVFVKGMGNFVKTDKAKLLQSLESLGLHANSGTSECPFCCCKILDICYKLMQKLKHGHSLSEGIPDEFIAKSQIEKEYLLVLSVCNKIKGKKVFNTRRNTLLFLDLIMLNFVIDVFENNPTELCFLKESGLIIGQMLLFSNDRVLDILSARKLLKKKLEISAHWVKKCNSILKRAEPDLWDYVSKYITEPKFDSLTSLAEELCTERPVMRYKVQIHSGDGCSHKEFETLSEQQQICLFKCLSHVSLSLTNSMKTSFSSRLLVNEVDHKKYFGTVRLKECYVQKFFLTNELYGLLFYQKTGERSRCYSLYLSDKGQLKEVGSFYCDPKRFFLPIFSDTVLLLMCAEMVSWLDFCEELAREVDPLLRLLVLSILCSPSKRNQTFLQGLRYFIMAFVNQAHHVQLMSKLVVECKSASDVLIQRLSVRMFRMVLDFGSDPDAFMSRKFKFLLNVSYLCHLVTKETPDRLTDQIKCFEKFLEPKLEFGFFVVNPSLNGTLTKEQEDAMVGGVSKFFSKDIFNIEDMKQPGVSRDLLSYCLTLFNKGKLKVNGSLKVNPFRPSFTSTALDLSSNKSVVIPKLDELGNIVSVYDKQKLVSTCVASLVERFKTKGKFNLDPNEIEFLIMDNLTNLLAIKGSAVKEREELSMLYEQLSDDAIKAFEELRQDVEFTLGRMRTPEKKKKTTNFYGNCTLESLWAPFNVMKAIRTETSIHEIRDFDPNILPPEIYEELCTSVFESSLKESFFLNEVLDICPLELLLKNLTTRCFEEQEFFDCFKYLLIHAGFDQRLGTYEHKSKSRLGLSEDVFKLRDDVRMSQRESNSEAIARRLDKSFFTSAALRNLCFYSEESPTEYTCISPNTGNLKFGLSYKEQVGSNRELYVGDLNTKMMTRLVEDFAEAVAKSMNYTCLNSEKEFEKAICDMKMAVNAGDICCSLDHSKWGPFMSPALFLSFINELKLKDHETSALIDCRPVLSVLRWHLHKAVEVPFNVAEAYCTGMLKRRLGLMSLQSQSVSEEFFHQQLLMGKEVPSHIMSVLDMGQGILHNLSDLYGLITEQFLNYCLDLLFDVVPISYTSSDDQITMIKFPTTNAPEGGESQSDWLEVLCFHDFLSSKLNKFVSPKSVCGSFAAEFKSRFFVMGEETPLLTKFVSAALHNVKCKTPTQLAETIDTICDQCVANGVGVTIVGEISKRVNRLIKYSGYPQTPFLAVEVQDVKDWVDGSRGYRLQRNVENCLSDHPQLELIRKSAKKVLTKIKRGLIFEEHLVQLIGKGGDNAMEAFLSYIDCSEIEKREALRYRWLNLSSNGDLRLVLRTKLMSARRVLEKEQIPTLIKTLQSKLSKNFSRGAKKILAESINKSAFQSSVASGFIGFCKSMGSKCVRDGSGGFLYIKDVISKVKICSCDICSLAPGIVFCDEALENVSMFSRPILWDYFSLVLTNACELGEWVFSCVQIPPKPTLLSNPNLFWAVKPRGVRLVEDQLGLNHVLQSVKRNYPKIFEEHLVPFMSDLQVSRTTDFTKLKYLDVCIALDMMNENLGIISHLLKGRDNSLYIVKQNECASAHVRQVEYVDYDVGLSPQQICSNFKIQLTFSSFINPLVMTTSTLRSFFWFGEVLRLEDENQIDVGELTDFVLLIKKYNVDRAMMLDDLTMGFVVSEIGEPKFRLLDFEWSGVEEQTSFPLSENSNNNEIKFTLNLQLEHKRLSTKYRLTRLVVYSYTMVCVMLVNDSRGVLKVENLTLRASGDVKEHRFLDGVTLVSHHPTLCGKRGINILDLFRDAELPIPETRMFPEEVFLDLSDYQSEVEDKYAYEIVGPEFSDVPLVMSGGCLVVGDKKLSHLLTELTGNVILKALGALETDGEIGSFLMGLWPYIKATKQRVKISQEEFLFIYETHRRSLLMSFEAYNDWLEFLDFSVCFSKTLGDLVVSDSSGNMRLRGVVCRPLRQVGTVMEIE

SEQ ID NO: 80 - protein, 507 aa, Flexal virus (FELV)
  Amino acid sequence of glycoprotein precursor (GPC) protein in Flexal virus (FELV)
MGQVVTFFQSIPEIIQEAINIALIAVSVICIIKGCVNLWKCGLIQLMVFLLLAGKRCDALNIDRRHVLSSVELNLTRMFDNFPQSCSKNNTHHYYKGPEGTNWGIELTLTNTSVANYTSMNRIRSLAFGNITNCDKTGEAGHTLKWLLNELHFNVLHVTRHVGARCMTTEGAGLLIQYNLTIGDHGGEVGRHLIASLAQIIGDNKAAWVGKCDSRCSNDGKCNYTNCEGYTHYNYLIIQNTTWAQHCTYSPLPSIRMALNKVAYSSVSRSLLGFFTWDISDSSGNHVPGGYCLEQWAVVWAGIKCFDNAVMAKCNKEHDVEFCDTMRLFDYNQNAIKTLQLNTENAVNLLKRSINGLISDSLVIRNSLKQLARIPYCNYTKFWYINDTVSGKHSLPQCWKVHNGSYLNESQFKNEWLLESDHLYSEMLLKEYEERQGRTPLALTDICFWSLVFFTSTVFLHLVGIPSHRHIVGDACPKPHRITKNALCSCGYYNLPGKQVRWVRKGK

SEQ ID NO: 81 - protein, 559 aa, Flexal virus (FELV)
  Amino acid sequence of NP protein in FLEV
MSDSNIPAFRWTQALRRGLSNWTQTVKADVIKDAKAIMSALDFNQVAQVQRMMRKDKRSEADLTRLRDMNKEVDALMTMRSVQRDVVLKIGGLSKDELLELSSDLEKLRKKVMRAEGSSTPGVYQGNLTTSQLQQRADLLKLVGMKPLQQSRGGVVKVWDVKDSSLMINQFGSMPALTIACMTEQGGEQMNDVVQGLTALGLVYTVKFPNLDDLEKLTEQHPCLKLITQEQSQINISGYNLSLSAAVKAGACMIDGGNMLETIKVSPSMFSTLIKTVLQVKNREGMFIGNAGPQRNPYENLLYKICLSGEGWPYIGSRSQVSGRAWDNTSIDIEGKPSPNHPPVRNGGTPQINPLSRDQEDQVKGAVRLLDPKVTTWVDIEGPPGDLVEFAIFQPNSGKYLHCYRRPHNEQSFKDQSKFSHGLLLKDLESAQPGLVSAIIRALPEGMVLTAQGSDDIEKLFLMHGRRDLKVVDVALTSEQARVYEDTVWERFNPLCKKHKGLVIKKKKKGAAPTSTNAHCALLDCIMFDATITGYIADAKPQQLLPIDLLYRTENLIHL

SEQ ID NO: 82 - protein, 95 aa, Flexal virus (FELV)
  Amino acid sequence of Z protein in FLEV
MGLRYSKAVRDRYGERETVGRVPMTLNLPQGLYGRFNCKSCWFANKGLIACSDHYLCLNCLTRMLSRSEFCEICNRPLPTKIIFEESPSAPPYEP

SEQ ID NO: 83 - protein, 2208 aa, Flexal virus (FELV)
  Amino acid sequence of L protein in FLEV
MDETLNEMRDLIRKWVPDEPEFIEQKASSLSQVHLRAVVIEGLKLLSLLVEVDSCKKNRCIHNRSKTVNAILREYKMVAPTLPDLVPDGYLVTGDIVVLLEAFVRVNQSSFEVKYNHDFGKLMMLSQDLSKVGITLVPVVDGRSNYYVDYIPDWVIERLRWLIITIMKQLKDDGEDIEEVEYERLVCSLSTMENQGLGLESLTQMRECGASYKQRLESVLSLGVNGQLSVSDCKTAILKLFTEYQTLKEQGYLAESFKSTDRLELQEALRSHSLIEHGNLGASPHCELCQNHMIEVLTKLKGSKSSSNTKLVSQEVSEYFSLLSVCNKIKGQKILNTRRLTFLSLDVIMFNKFLQIIKKDCTQDVHFLVGGCLRSVNDRLVCPDLIVKAYERKMISSPKWLTKVDQKLVHGLPEPLRQNYELQVQPLLTELDLETWAEYYDSYRENWGNKPSINYNAIATPCNCEENDRLDYVNLSDESFLQYLEALSTLSLGLVNSMKTASTTKLTVNQPDNYYGFVHCNECYYQEFQEAYRSVLLYQKTGEKNRCYSIFKTVGGGDSEEHLASFYCDPKRFFLPIMSSDVIHSMACEMLSWLDFMSDSDKRKVSCNLRKLLLCVMCTPTKRLQTYLQGMRYFIMAYVNELHHVQLLNKLKIVAKSKAEFHTMCLTDDLILSVLTSSDEVNMTKAFKFILNVSYLCHLITKETPDRLTDQIKCFEKFMEPKLNFDSVLINPSMSLHLEPKQEDKFLNDMTRLLSKDVKGAQGSDPGTDPLLMSICSSLFNHGELGLPNKLSRDPQSPSFTSTALDLSSNKSVVVPKLNELGEPITTYDYQTLVSSVVVELSESFKNKLQYKLDRKSLVYKIYDRLMGLVSNKVKHPIDEPFDSEDDILDSVSDEVKDVILKIESDVTSCLSRMESSKCNHGCEKKVGTGKADHNPLDSLWSEEVRMRVNIETSHHEVKDFDFNTFPPETYEELVQIVFESRFKELYFTERVFSPCPLEMLLRNLTRKYYEEQDFFECFKYILVSTGYDNRVGRYDHKKINRLGFKEPALNISEVVRISTRESNSESILKRLDKSFFTNSSLRNLCFYSDESATERSCVGTNIGRLKFGLSYKEQVGGNRELYVGDLNTKLTTRLIEDYFESIVGDMRYSCLNNEKEFEKALLDMKAIIRQSGFVVSMDHSKWGPHMSPVIFSQFLRLLKLSLLDGSVIDNRPILELLNWHIHKMVEVPFNVVRAYMKGYIKRCTGVMEKNSMTMVEDFMHKQFETGVVPSHISSVIDMGQGILHNVSDFYGLVTEQFINYCIKLCYDTPCLSYTSSDDEILMSSSFILKKNDGELDVELAKDILDFHDFLSRGLNKFVSPKTVAGTFACEFKSRFFIWSQEVPLLTKFVAAALHNVKAKAPNQLAETIDTILDQCVANGVSIEVVGRIAKRTNALLRYSGHPYNLFLCLEETDVKDWVDGSRGYRLQRSVENVFPDDEVPGIVRAAARKVFHLIRSGTIEEEYLVSTIQTDPDDCLRRILEIADVTNEQIERILDFRWLNLRAHGDYRMVLRTKLMNSARIIEREEIPSLIKSVQSKLSKNFVRGAKKIITDAVNKSAFQSCIASGFVGVCKSMGSKCVRDGKGSFLYIKDVLKDIIKHVNCHSCRNYCNIYCREALKEVSEYSRPLFWDYFALVLTNACELGNWVFSKAVLPKSVYKLDNPSQFWLCKPSSHTELEDKVNLNHVLFSIKRNFPSLFEEHVAPYLSDLNTLKISWVQRIKFLDICVAVDMTSESLGIISHMIKRKREELYVVKQNEQSMSHLREASTFEEGLQLNSYEICYNFLLQILFESMLTPVLLTTSQLKKYFWYGEVELLPNTEPHELQQLTQFVMDCKMLNISKAMTIDDLDLGFVQSTMKMTDVNLNLSTFLTKVDWANRYLYETFESMFIESPDSEFSMELVLVFSHIRKSYKHKYEHTTTYTVKASFVLETSLFSDQDDQDVLVIPVKDVECFVSNSPGNHLQLDGAGLIPLVPVVSGKEVLNFDLLLKDQDVSFSGTSPHLSKVRLDFSAHIKELKNKFSYKIIGPEMGFTPLHLDKGIIKEGDRIVSKLNVNVTSKSLFMALGLLSNDKVSEFLESLFYYLKSSGKTGALLSMTTSDLQNLVDNYNEDFKQILKRESDWVSFGAFKLAYSNSLSAIMIQDERGPYRLKGLSCEKLLKSHDERVEID

SEQ ID NO: 84 - protein, 479 aa, Guanarito virus (GTOV)
  Amino acid sequence of glycoprotein precursor (GPC) protein in Guanarito virus (GTOV)
MGQLISFFQDIPIFFEEALNVALAVVTLLAIIKGIVNVWKSGILQLFVFLVLAGRSCSFKVGHHTNFESFTVKLGGVFHELPSLCRVNNSYSLIRLSHNSNQALSVEYVDVHPVLCSSSPTILDNYTQCIKGSPEFDWILGWTIKGLGHDFLRDPRICCEPKKTTNAEFTFQLNLTDSPETHHYRSKIEVGIRHLFGNYITNDSYSKMSVVMRNTTWEGQCSNSHVNTLRFLVKNAGYLVGRKPLAFFSWSLSDPKGNDMPGGYCLERWMLVAGDLKCFGNTAVAKCNLNHDSEFCDMLRLFDFNKNAIEKLNNQTKTAVNMLTHSINSLISDNLLMRNKLKEILKVPYCNYTRFWYINHTKSGEHSLPRCWLVSNGSYLNESDFRNEWILESDHLIAEMLSKEYQDRQGKTPLTLVDLCFWSAIFFTTSLFLHLVGFPTHRHIQGDPCPLPHRLDRNGACRCGRFQKLGKQVTWKRKH

SEQ ID NO: 85 - protein, 58 aa, Guanarito virus (GTOV)
  Amino acid sequence of GP signal peptide in GTOV
MGQLISFFQDIPIFFEEALNVALAVVTLLAIIKGIVNVWKSGILQLFVFLVLAGRSCS

SEQ ID NO: 86 - protein, 187 aa, Guanarito virus (GTOV)
  Amino acid sequence of GP1 protein in GTOV
FKVGHHTNFESFTVKLGGVFHELPSLCRVNNSYSLIRLSHNSNQALSVEYVDVHPVLCSSSPTILDNYTQCIKGSPEFDWILGWTIKGLGHDFLRDPRICCEPKKTTNAEFTFQLNLTDSPETHHYRSKIEVGIRHLFGNYITNDSYSKMSVVMRNTTWEGQCSNSHVNTLRFLVKNAGYLVGRKPL

SEQ ID NO: 87 - protein, 234 aa, Guanarito virus (GTOV)
  Amino acid sequence of GP2 protein in GTOV
AFFSWSLSDPKGNDMPGGYCLERWMLVAGDLKCFGNTAVAKCNLNHDSEFCDMLRLFDFNKNAIEKLNNQTKTAVNMLTHSINSLISDNLLMRNKLKEILKVPYCNYTRFWYINHTKSGEHSLPRCWLVSNGSYLNESDFRNEWILESDHLIAEMLSKEYQDRQGKTPLTLVDLCFWSAIFFTTSLFLHLVGFPTHRHIQGDPCPLPHRLDRNGACRCGRFQKLGKQVTWKRKH

SEQ ID NO: 88 - protein, 560 aa, Guanarito virus (GTOV)
  Amino acid sequence of NP protein in GTOV
MAHSKEIPSFRWTQSLRRELGMFTEPTKSSVLNDAKLIADSLDFTQVSQVQRLLRKSKRGDTDLDKLRDLNKEVDRLMSMKSVQNNTVLKVGDLGKDELMDLASDLEKLKKKIGDRESNSPRMYMGNLTQSQLEKRAGILRTLGFQQQRGAAGGVVRLWDVSDPSKLNNQFGSMPALTIACMTVQGGETMNNVVQALTSLGLLYTVKYPNLDDLEKLTLEHDCLQIITKDESALNISGYNFSLSAAVKAGASLIDGGNMLETIKVTPNNFSSIVKAALNVKRREGMFIDERPGNRNPYENLLYKLCLSGEGWPYIGSRSQILGRSWDNTSVDLNARPVTGPRAPEKNGQNIRLSNLSEMQEAIVKEAMRKLDSSDTIWMDIEGPPTDPVELAVFQPSSGNYVHCFRKPHDEKGFKNGSRHSHGILLKDLEDAQPGLLSYVIGLLPQGSVITVQGADDIKKLFDIHGRKDLKLVDVRLTGEQSRIFEQEVWEKFGHLCRAHNGVIVPKKKNKEANSTKEPHCALLDCIMFQSVLDGHLPDTIPIQLLPNTLVFQAKSAFVM

SEQ ID NO: 89 - protein, 95 aa, Guanarito virus (GTOV)
  Amino acid sequence of Z protein in GTOV
MGNSKSKSNPSSSSESQKGAPTVTEFRRTAIHSLYGRYNCKCCWFADKNLIKCSDHYLCLRCLNVMLKNSDLCNICWEQLPTCITVPEEPSAPPE

SEQ ID NO: 90 - protein, 2198 aa, Guanarito virus (GTOV)
  Amino acid sequence of L protein in GTOV
MDEKVFVLKDFIRRQVPDIPELSYQKEALLSQVEVPMVLTEGFKLLSCLVEIESCRKNSCECNFEQKFVDTILSENGVVAPTLPKVIPDGYRFFNKTLILLETFVRVNPEEFEKKWKTDMAKLLSLKEDIHRTGITLVPVVDGRGNYNTDLLPDWATERFRWLLIDLLRESRGAPTMEIEDQEYHRLIHSLSKTSNQSLGFENIECLKRVHLNYEERLNEQLLKDIVGEVRESKIREELIKLKTWYREEIYRKGLGNFVQTDRKSLLQTLVLSSAHSDSLAPECPMCCSKILDLCYQLSMRIANQTSLENNFDEPPLPTTQIEKVYLSLLSACNKIKGKKVFNTRRNTLLFLDLIILNFVAHVYKTQPSEMETLKKAGLIIGEMLLLPNDRVLDILVARRLLLKKVESCCNWLDRCRHLLRKEEPVLWDCVSEFTNVPDFELLLSLAEELCSEKPVMHYKPPSSLIGDCAHKDLMSMSDGEFESLFKCLSHISLSLVNSMKTSFSSRLLVNEKDYKRYYGTVRLKECYVQRFFLRVGLYGLLFYQKTGEKSRCYSLYLSDKGNLVELGSFYSDPKRFFLPIFSEFVLLATCAEMLSWLDFDEKLVDAVTPLLKILVLSILSSPTKRSQTFLQGLRYFIMAYVNQAHHIQLMSKLAVECKSASDVLIQRLSVKIVDMVLSDGSDPDMHMTRKFKFVLNVSYLCHLITKETPDRLTDQIKCFEKFMEPKLEFGSLIVNPSLNGFLSKEQEDVMIEGVEKFFSKELLTVEDLKRPGVSRELLSYCVSLFNKGRLRVNGTLGTDPYRPSFTSTALDLSSNKSVVIPKLNEVGEIVSEYDKQKLVSTCITSMAERFKTKGRYNLDPDTIDFLIMRNLTNLLSARKLDSSKKEELSLLYEHLSEDVMKAFEEIKYEVEITLSKMRLSRELECGHKKPCTLEGVWAPFNVLKVIRSETSVHEIRDFDPDLLGEDVYEKLCVAVYDSPLRPTFFLEKPLDICPLELLLKNLTTKSYEDDEFFDCFKYILIQAGFDQRLGAYEHKNRSRLGLSEEAFRLKEDVRVSNRQSNSEAIADRLDKSFFTSAALRNLCFYSEESPTEYTCISPNVGNLKFGLSYKEQVGSNRELYVGDLNTKMMTRLVEDFTEAVANSMNYTCLNSEKEFERAICDMKMAVNNGDLCCSLDHSKWGPFMSPALFHAFFGALKFKISKTGEQVDLGPVLNVLKWHLHKAVEVPISVAEAYCTGMLKRRLGLMSLSCQSVCEEFFHQKLLLEEGVPSHIMSVLDMGQGILHNSSDLYGLITEQFINYCLDFLFDVIPVSYTSSDDQITTFKLPTMSSSEDGLDGFDWLELLCFHDFLSSKFNKFVSPKSVSGTFVAEFKSRFFVMGEETPLLTKFVSAALHNVKCKTPTQLAETIDTICDQCVANGVGIEIVTKISERVNRLIRYSGYPQTPFLAVEKQDVKDWTDGSRGYRLQRNIEHYLQGSEQLEFVRKCAKKVLLKIKKGQVFEEYLVQLIGKDGDDALKGFLSYAGCESDEIKDVLKYRWLNLSANGDLRLVLRTKLMSTRRVLEREQIPTLIKTLQSKLSKNFTKGVKKILAESINKSAFQSSVASGFIGFCKSMGSKCVRDGSGGFMYIREVLNKQRVCPCEICAQNPGIIFCSDALTLIPEFSRSILWDYFSLVLTNACELGEWVFSSVQPPKVPILLNNPNLFWAVKPRGTRLIEDQLGLGHVLQSVRRSYPKVFEEHLVPFMNDLQVSRTTDFTRLRYLDVCVALDMMNENLGIVSHLLKAKDNSIYIVKQSECAVAHIRQVEYVNQELGLSPQQICSNFKIQLVFSSMINPLVITTSVLKSFFWFNEVLNLEDESQIDVGELTDFTILIKKYNLNRAMMLDDLTMGYVVSTISEPTIHLVSLKRNSNSIVGEQNSEMLHGEQVEDMYSIVLHIQLEHKRHSTKYHLSRTVVYSYTVECETNITDIEKEPSLATVKNVVLRASGSIEGHQFLDGVNLVASQPIFTGKKVINLSELLADSEITETYKEGDAVGSILLNFGTFYEHIDDRYAYEIVGPECSDSPLVLDGGSILADGKKLSSIKVELTGDVILKALGALESEKEVQSLLTGLWPFIRINNLKVKMAQEDFLLMYEMHRESLLKSLEVFSEWCEFVDFSVCYSKSLRDLVISDSSGSLRLKGITCKPINLSNSVTEIE

SEQ ID NO: 91 - protein, 515 aa, Latino virus (LATV)
  Amino acid sequence of glycoprotein precursor (GPC) protein in Latino virus (LATV)
MGQVIGFFQSLPEIINEALNIALICVALLATIKGMVNIWKSGLIQLLFFLTLAGRSCSHSFTIGRFHEFQSVTVNFTQFMSYAPSSCSVNNTHHYFKGPQNTTWGLELTLTNESMINITNSMRVFTNIHHNVTNCVQNISEHEGVLKWLLETMHLSISKPGKHIAPVMCERQKGLLIEYNLTMTKDHHPNYWNQVLYGLAKLLGSSKRLWFGACNKADCQMQSDHQHIKCNYSNCKGYTSFKYLIIQNTTWENHCEYNHLNTIHLLMSSIGQSFITRRLQAFLTWTLSDALGNDLPGGYCLEQWAVVWFGIKCFDNTAMAKCNQNHDSEFCDMLRLFDYNRNAIQSLNDQSQARLNLLTNTINSLVSDNLLMKNKLRELMNVPYCNYTRFWFINDTKNGRHTLPQCWLVSDGSYLNETRFRTQWLSESNSLYTEMLTEEYEKRQGRTPLSLVDLCFWSTLFYISTLFAHLVGFPTHRHLIGEGCPKPHRLTGSGICSCGHYGIPGKPVRWTKMSR

SEQ ID NO: 92 - protein, 58 aa, Latino virus (LATV)
  Amino acid sequence of GP signal peptide in LATV
MGQVIGFFQSLPEIINEALNIALICVALLATIKGMVNIWKSGLIQLLFFLTLAGRSCS

SEQ ID NO: 93 - protein, 222 aa, Latino virus (LATV)
  Amino acid sequence of GP1 protein in LATV
HSFTIGRFHEFQSVTVNFTQFMSYAPSSCSVNNTHHYFKGPQNTTWGLELTLTNESMINITNSMRVFTNIHHNVTNCVQNISEHEGVLKWLLETMHLSISKPGKHIAPVMCERQKGLLIEYNLTMTKDHHPNYWNQVLYGLAKLLGSSKRLWFGACNKADCQMQSDHQHIKCNYSNCKGYTSFKYLIIQNTTWENHCEYNHLNTIHLLMSSIGQSFITRRLQ

SEQ ID NO: 94 - protein, 235 aa, Latino virus (LATV)
  Amino acid sequence of GP2 protein in LATV
AFLTWTLSDALGNDLPGGYCLEQWAVVWFGIKCFDNTAMAKCNQNHDSEFCDMLRLFDYNRNAIQSLNDQSQARLNLLTNTINSLVSDNLLMKNKLRELMNVPYCNYTRFWFINDTKNGRHTLPQCWLVSDGSYLNETRFRTQWLSESNSLYTEMLTEEYEKRQGRTPLSLVDLCFWSTLFYISTLFAHLVGFPTHRHLIGEGCPKPHRLTGSGICSCGHYGIPGKPVRWTKMSR

SEQ ID NO: 95 - protein, 557 aa, Latino virus (LATV)
  Amino acid sequence of NP protein in LATV
MSGASEVPSFRWTQSLRRGLSHFTTSAKGDVLRDAKSLVDGLDFNQVSQVQRVMRKDKRSDDDLSKLRDLNRSVDSLMVMKNKQNNVSLKIGSLSKDELMDLATDLEKLKRKINLGDRQGPGVYQGNLTSAQLEKRSEILKSLGFQPRANQNGVVKVWDIKNPKLLINQFGSIPALTIACMSVQGAEQMNDVVQGLTSLGLLYTVKYPNLDDLNKLSKDHPCLEFITKEESANNISGYNLSLSAAVKAGACLVDGGNMLETILVKPDNFQDIVKSLLVIKRQEKMFVNEKPGLRNPYENILYKLCLSGEGWPYIGSRSQIVGRAWENTTVDLSKEVVYGPSAPVKNGGNMRLSPLSDTQEAVIKEAIGKLDMDETIWIDIEGPPNDPVELAIYQPSTGNYIHCFRVPHDEKGFKNGSKYSHGILLRDIENARSGLLSRILMRLPQKVVFTCQGSDDIQKLLQMNGRPDIATIDMSFSSEQARFFEGVVWEKFGHLCTRHNGVVLSRKKKGGNSGEPHCALLDCIIFQAAFEGQVTGQIPKPLLPNSLIFKDEPRVAM

SEQ ID NO: 96 - protein, 91 aa, Latino virus (LATV)
  Amino acid sequence of Z protein in LATV
MGSKQSAPPKPLQLPQPRVSLLREAKPSLYGRYNCKCCWFQDKNLVECSDHYLCLKCISSMLKRGKNCEICGKAIPTYIEVGITPTAPQLN

SEQ ID NO: 97 - protein, 2238 aa, Latino virus (LATV)
  Amino acid sequence of L protein in LATV
MDDIVNQLFDLLRKHFPARPKVTEQITLVTCQNDAKMILTEGFKLLSLLVELDSAEANNCTHNSDSLTIEGILRKEGIMSIALPRIVPDGFSLYGNVLILLETFVRVNPVSFEQKYNQDMSKLLSLKDDLSLCGITLVPLVDGRTNYYNRFVDDWVIERFRWLLLQLIKFVRESGEEIEELEYQRLITSLSKLENQSLGFENIEKLPQTGLKYRDELKKHMFGNLSSKMKESEIQENLINVLKEFFIKEYKNNKSLHKFVFTNRDGLLAKLDQITHHSEHPVDCMSCSSKLYSIIDKLGTLKRQPLHSDYHPIYAKMWHSDSLSQAEQIYLKLLSQCNKIKSAKLLNTRRNTLLFLDLIMVNFIVHSWKQNPEVLTEYRRCGLMAGQLALFSNDRYFDLNELRNKLINKLKNCENWIAKCVHQLKKQEFVALDDVLVWATVPDFESLELITTSLELKRFKLQYGKDKVDHNEHPIGPLSEETFFRNLNVLSSVCLALVNSMKTSFTSKTVINERRASNHFGEVDLIECYCQRFFLSKDLVGILSYQKTGEKSRCYSISLISNGELEYIGSFYCDPKRFFLPIFSQIVLLNMSREMMLWLADLNLNDSLVGDKLRKLILLIVTNPSKRNQTFLQGLRYFIMAYVNQFHHVELMDRLIVPVKSYCESCLQRISFDIFRLILEGDYDNEHMTRKFKFLLNVSYLCHLITKETPDRLTDQIKCFEKFMEPKLKFESVIVNPSLTENMTEDEEAQVLKGVDKLLGKSLSCSTDLTSPGVSKTLLSMCVSSFNRGLLNVNGHLRQDPYRPNFTSTALDLSSNKSVVVPKLDELGNPISRYDYELLVSSCVTNLAEGFKTKGKFKLDINCQEYTIMRNLTNLVLKNEDKSDAKIKGEKPCSFELSQWMETLSEEQLEVLEKLKGDVNIALGKLKEKGRSKSNSTLKEGVKRLDSGNTLAGCADPQQVLVNLWSEFGVMKQILVEVSLHEIKDFDPDIIPPQMIQKLVFKVNNSNYKSLFFLDSVINPCPLELLIKNMTTATFDDGELFECFKYLLITAGFDQKLGTYEHKNRSRFGFKFEALKVREEGRMSSRESNSEAIARRLDKSVFTNSALRNLCFYSDESPISYSHVSPDVGKLKFGLSYKEQVGSNRELYVGDLNTKLMTRLIEDFSESVVSNMSYSCLNNEAEFEKAITDMKMCVNLGDMSLSLDHSKWGPHMSPVIFAAFLQGLDLKYGPSLCKLNTDPIITLLSWHIHKVVEVPYNVIHAYVTGMIKRQLGLMNMSGSTITESFVHRLLKEKREPLSHVMSVIDMGQGILHNMSDLYGLVTEQFINYAIHFLFDMNTTSYTSSDDQISMIKIGSGMCNFESLKVIEEWETILNFHAFISTKFNKFVSPKTVAGTFAAEFKSRFFVWGEEVPLLTKFVSAALHNVKCKTPVQLSETVDTICDQCVANGVSVEIVSYICNRTNRLIRYSGFGEHPFLNVENLDVKDWVDGSRGYRLQRNIELHLESDGCTSFIRQAARKVFSNIKSGKIVEQALVDLVQEDGDKAITGFLRSVGVSEEDIALLCRIRWINLCAHGDLRLVLRTKLMSSRRIIETEEIPSLIKSIQSKLSKNFVKGAKKILAESINKSAFQSSIASGFIGFCQSVGSKCVRTGEGGFYYIKELKSKVDLYCPCEVCARWKGVTYCSSSCLKIESFTRPLMWDYFSLVLSNACELGEWVFEDVEYPKDINFLRNPNLFWLVKPRVSCQIEEKLGLTHILQSIRRNYPQLFETHLSPFMSDFQAGRTLGTMTVKFLDVCVALDLANENLGIVKHFLKNRRHDIYIVKQDESSQSHIRCQKSICVDVELTSTQVCQNFMTQLIMSSLVQPLVLTSSELKKFNWFQQVLTLETDEDVDLGLLTDFALQVKKFNVDRAMHSEDLSAGYISSTVSVTTFSLSKPIFLQQIDSDFIGGTEDRKDFIQMIKSEFTKNSIDLQFVIQISHVKRALRFNLKRTTVYTLIVRTSILKEVILNSLGQEDQSVELVVDDLELFCSGHDGNHFTLDAAPLIVQEPLINGNLKFDLVSRLEEEDLTFSYSESLPSFHFNFEKYKHELCNKFSYHLSGPVIVDEPLVLDRGVILHGGRKLTTLQFDFSADRIMQALSELESLSSRDLFLFNLWVYSDQTKSKLYIHQDKLLLLVESYLSELNSSLARYDSWLNLGNYMICYSKSFKCLMISDTNGRNRLKGILCRRLIEEEVQDIE

SEQ ID NO: 98 - protein, 496 aa, Machupo virus (MACV)
  Amino acid sequence of glycoprotein precursor (GPC) protein in Machupo virus (MACV)
MGQLISFFQEIPVFLQEALNIALVAVSLIAVIKGIINLYKSGLFQFIFFLLLAGRSCSDGTFKIGLHTEFQSVTLTMQRLLANHSNELPSLCMLNNSFYYMRGGVNTFLIRVSDISVLMKEYDVSIYEPEDLGNCLNKSDSSWAIHWFSNALGHDWLMDPPMLCRNKTKKEGSNIQFNISKADDARVYGKKIRNGMRHLFRGFHDPCEEGKVCYLTINQCGDPSSFDYCGVNHLSKCQFDHVNTLHFLVRSKTHLNFERSLKAFFSWSLTDSSGKDMPGGYCLEEWMLIAAKMKCFGNTAVAKCNQNHDSEFCDMLRLFDYNKNAIKTLNDESKKEINLLSQTVNALISDNLLMKNKIKELMSIPYCNYTKFWYVNHTLTGQHTLPRCWLIRNGSYLNTSEFRNDWILESDHLISEMLSKEYAERQGKTPITLVDICFWSTIFFTASLFLHLVGIPTHRHLKGEACPLPHKLDSFGGCRCGKYPRLKKPTIWHKRH

SEQ ID NO: 99 - protein, 58 aa, Machupo virus (MACV)
  Amino acid sequence of GP signal peptide in MACV
MGQLISFFQEIPVFLQEALNIALVAVSLIAVIKGIINLYKSGLFQFIFFLLLAGRSCS

SEQ ID NO: 100 - protein, 204 aa, Machupo virus (MACV)
  Amino acid sequence of GP1 protein in MACV
DGTFKIGLHTEFQSVTLTMQRLLANHSNELPSLCMLNNSFYYMRGGVNTFLIRVSDISVLMKEYDVSIYEPEDLGNCLNKSDSSWAIHWFSNALGHDWLMDPPMLCRNKTKKEGSNIQFNISKADDARVYGKKIRNGMRHLFRGFHDPCEEGKVCYLTINQCGDPSSFDYCGVNHLSKCQFDHVNTLHFLVRSKTHLNFERSLK

SEQ ID NO: 101 - protein, 234 aa, Machupo virus (MACV)
  Amino acid sequence of GP2 protein in MACV
AFFSWSLTDSSGKDMPGGYCLEEWMLIAAKMKCFGNTAVAKCNQNHDSEFCDMLRLFDYNKNAIKTLNDESKKEINLLSQTVNALISDNLLMKNKIKELMSIPYCNYTKFWYVNHTLTGQHTLPRCWLIRNGSYLNTSEFRNDWILESDHLISEMLSKEYAERQGKTPITLVDICFWSTIFFTASLFLHLVGIPTHRHLKGEACPLPHKLDSFGGCRCGKYPRLKKPTIWHKRH

SEQ ID NO: 102 - protein, 564 aa, Machupo virus (MACV)
  Amino acid sequence of NP protein in MACV
MAHSKEIPSFRWTQSLRRGLSQFTHTVKTDVLKDAKLIADSIDFNQVSQVQRALRKNKRGEEDLNKLRDLNKEVDRLMSMKSIQKNTIFKIGDLGRDELMELASDLEKLKNKIKRTESGPQGLYMGNLSQLQLTKRSEILKTLGFQQQRGAGNGVVRIWDVSDPSKLNNQFGSMPALTIACMTVQGGETMNSVVQALTSLGLLYTVKYPNLNDLDKLTLEHECLQIVTKDESSINISGYNFSLSAAVKAGASILDGGNMLETIRVTPDNFSSLIKSTLQVKRKEGMFIDEKPGNRNPYENLLYKLCLSGDGWPYIGSRSQILGRSWDNTSVDLTKKPQVGPRQPEKNGQNLRLANLTEMQEAVIKEAVKKLDPTNTLWLDIEGPPTDPVELALYQPANKHYIHCFRKPHDEKGFKNGSRHSHGILMQDIEDAMPGVLSYVIGLLPQDMVITTQGSDDIRKLLDIHGRKDLKLVDVKLTSDQARLYDQQIWEKFGHLCKHHNGVVVNKKKREKDSPFKLSSGEPHCALLDCIMYQSVMDGKMVDEEPVALLPLSLLFLPKAAFAL

SEQ ID NO: 103 - protein, 94 aa, Machupo virus (MACV)
  Amino acid sequence of Z protein in MACV
MGNCNKPPKRPPNTQTSSNQPSAEFRRTAPPSLYGRYNCKCCWFADTNLITCNDHYLCLRCHQTMLRNSELCHICWKPLPTSITVPVEPSAPPP

SEQ ID NO: 104 - protein, 2209 aa, Machupo virus (MACV)
  Amino acid sequence of L protein in MACV
MDEYVQELKGLIRKHIPERCEFGHQKVTFLSQVHPSPLLTEGFKLLSSLVELESCEAHACQANTDQRFVDVILSDNGILCPTLPKVIPDGFKLTGKTLILLETFVRVNPDEFEKKWKADMSKLLNLKHDLQKSGVTLVPIVDGRSNYNNRFVADWVIERIRWLLIGILKASKSMLEIDIEDQEYQRLIHSLSNVKNQSLGLENLEHLKRNSLDYDERLNESLFIGLKGDIRESTVREELIKLKLWFKDEVFSKGLGKFKLTDRRELLESLSSLGAHLDSDVSSCPFCNNKLMEIVYNVTFSCVERTDGVATVDQQFSTTHSNIEKHYLSVLSLCNKIKGLKVFNTRRNTLLFLDLIMVNLMVDISDSCQDAIESLRKSGLIVGQMVMLVNDRVLDILEAVKLIRKKIGTNPNWVKNCSKILERSHPEIWHHLSTLIKQPDFNSLISIAQHLVSDRPIMRYSVERGSDKICRHKLFQEMSSFEQMRLFKTLSSISLSLINSMKTSFSSRLLVNEREFSKYFGNVRLRECYAQRFYLAESLVGFLFYQKTGERSRCYSVYLSDNGVMSEQGSFYCDPKRFFLPVFSDEVLAGMCEEMTSWLDFDTGLMNDTGPILRLLVLAILCSPSKRNQTFLQGLRYFLMAFANQIHHIDLTSKLVVECKSSSEVVVQRLAVGLFIRLLSGESDASLFFSRRFKYLLNVSYLCHLITKETPDRLTDQMKCFEKFIEPKVKFGCAVVNPSLNGKLTVDQEDIMINGLKKFFSKSLRDTEDVQTPGVCKELLNYCVSLFNRGKLKVSGELKNNPFRPNITSTALDLSSNKSVVIPKLDELGNILSTYDKEKLVSACVSSMAERFKTKGRYNLDPDSTDYLILKNLTGLVSAGPKAKSTQEELSLMYEALTEEQVESFNEIKHDVQVALAKMADNSVNTRTKNLGRADNSVKNGNNPLDNLWSPFGVMKEIRAEVSLHEVKDFDPDVLPPEVYKELCDAVYKSSEKCNFFLEGVLDVCPLGLLLKNLTTSSYVDEEYFMCFKYLLIQGHFDQKLGSYEHKSRSRLGFTDETLRLKDEVRLSIRESNSEAIADKLDKSYFTNAALRNLCFYSEDSPTEFTSISSNSGNLKFGLSYKEQVGSNRELYVGDLNTKLMTRLVEDFSEAVGNSMKYTCLNSEKEFERAICDMKMAVNNGDLSCSYDHSKWGPTMSPALFLALLQMLELRTPVDRSKIDLDSVKSILKWHLHKVVEVPINVAEAYCIGKLKRSLGLMGCGSTSLSEEFFHQTMQLNGQIPSHIMSVLDMGQGILHNTSDLYGLITEQFLCYALDLLYDVIPVSYTSSDDQITLIKTPSLDIEGGSDAAEWLEMICFHEFLSSKLNKFVSPKSVIGTFVAEFKSRFFVMGEETPLLTKFVAAALHNVKCKTPTQLSETIDTICDQCIANGVSTKIVTRISKRVNQLIRYSGYGETPFGAIEDQDVKDWVDGSRGYRLQRKIEAIFHDDKETSFIRNCARKVFNDIKRGRIFEENLINLIGRGGDEALTGFLQYAGCSEQEVNRVLNYRWVNLSSFGDLRLVLRTKLMTSRRVLEREEVPTLIKTLQSKLSRNFTKGVKKILAESINKSAFQSSVASGFIGFCKSMGSKCVRDGKGGFLYIKEVYSGVSACTCEICALKPKIIYCNNSLNKVSQFSKPILWDYFSLVLTNACELGEWVFSTVKEPQKPLVLNNQNFFWAVKPKVVRQIEDQLGMNHVLQSIRRNYPVLFDEHLTPFMNDLQVSRTMDSGRLKFLDVCIALDMMNENLGIISHLLKTRDNSVYIVKQSDCALAHIRQSSYTDWELGLSPQQICTNFKTQLVLSSMVNPLVLSTSCLKSFFWFNEVLELEDDSQIELAELTDFALMVKNQNVSRAMFVEDIAMGYVVSNFEGVRISLSNVMVDGVQLPPQEKAPDIGELFGLKAENVIVGLVVQIDHVRMSTKFKLKRKMVYSFSLECIMDVGEIQNKEVILKVVAVDQSVSGSGGNHMLLDGVSVVASLPLFTGQASFDLAAMLIESNLAGSNDNFLMRNVTLDLGGFSPELSDKYSYRLSGPENQEDPLVLKDGAFYVGGERLSTYKVEFTGDLVVKALGALEDDESVVSMLHQLWPYLKATSQVILFQQEDFTIVHDLYKKQLTKSIESFGEWIEFTNFKVAYSKSLKELVISDTQGSFRLKGVMCRPLASTPQVEDIE

SEQ ID NO: 105 - protein, 507 aa, Parana virus (PARV)
  Amino acid sequence of glycoprotein precursor (GPC) protein in Parana virus (PARV)
MGQLVTLFQSIPEIIEEAVNIALIAVAIMCIVKGTVNLWKCGIVQLCIFLLLAGKRCDGFQIDRRHKLESVEFNLTRMFNNLPMSCSKNNTHHYYKGPEGTNWGIELTLTNESVANYSNMSAIRSLAYGNITNCDKTNEAGHTLKWLLNELHFNVLHVTRHIGARCLTTDSAGILIQYNLTVGDYGGEVGRHLIASLAQIIGDDKAAWVGKCFNNCSANGTCRLTNCEGYTHYNYLIIQNTTWENHCSYSPMSTIRMALNKVAYSSVSRKLLGFFTWDISDSSGRHVPGGYCLEQWALVWAGIKCFDNSVMAKCNKDHNEEFCDTMRLFDFNQNAIKTLQLNTENSINLLKRSINGLISDSLVIRNSLKQLARIPYCNYTKFWYVNDTITKRHSLPQCWLTYNGSYLNETHFRNDWLLESQQLYNDMLVKEYEERQGKTPIALTDICFWSLVYFTVSVFLQLVGIPSHRHIVGQGCPKPHRISRNGLCSCGYYNIPMKPVRWVRKGK

SEQ ID NO: 106 - protein, 559 aa, Parana virus (PARV)
  Amino acid sequence of nucleoprotein (NP) protein in PARV
MSEKQVPSFRWTQALRRGLSNWTEPVKVDVIKDARAIISALDFNQVAQVQRIMRKEKRTDSDLTRLRDMNKEVDALMSMRSTQHNVVLRAGGLSKDELLELSADLEKLRKKVIRAEGGNPGVYQGNLTATQLNQRAELMKLVGMGPGLRSGNGVVRVWDVKDSSLMINQFGSMPALTIACMTEQGGETMNDVVQGLSALGLVYTVKFPNLDDLEKLSEQHPCLKSITQEQSQINISGYNLSLSAAVKAGACMIDGGNMLETIKMSPPMFSSIIKAVLQVKNREQMFVGSVGVQRNPYENLLYKLCLSGEGWPYIGSRSQIVGRAWDNTLIDLEGKPAVSPPPVKNGGPINLSPLSKGQEDLINQAVQKLSPKETTWIDIEGPAGDPVELAIYQPESGNYLHCYRAPHNESAFKDQSRYSHGLLLKDLKAARPGLISAIIKALPKGMVLTAQGSDDIEQLILMHGRRDIKVVDVKLTSEHARVFEDPVWDRFNPLCEKHTGLVIKKKKKGAPPSSTNPHCALMDCIMFDATVTGYIRDVKPRQLIPIDLLFKDDLNLINL

SEQ ID NO: 107 - protein, 95 aa, Parana virus (PARV)
  Amino acid sequence of Z protein in PARV
MGLRYSKAVKDKYGDREIEGRATMTLNLPQGLYGRFNCKRCWFATKGLIACSDHYLCLNCLTIMLSDGNFCEVCGKTLPKKIVFEESPSAPPYDG

SEQ ID NO: 108 - protein, 2202 aa, Parana virus (PARV)
  Amino acid sequence of L protein in PARV
MTEIISELKDLIRKWVPDEEHYIEQKSLTLSQVHTRAVVIEGLKLLSLIVEVDSCLKHKCIPNRNKTVNMILKDHKLVGPTLPECTPDGYYLCGDVLILLEVFVRSNQSAFEKKYAADFEKLMSLAKDLTSYGITLVPVIDGRSNYYVEAIPDWVIERLRWLLLKVMDSLKDEGEDIEETEYSRLIHSLSTMENQNLGLESISQLKQTGLTYKKKLQALFTKNIRPNMSLGECRLKLIEIFNEFRLRLESGTVERAYTQTNQDFLLNKLKEHSLLKVSRVSKFDSKGDCHLCSNHLIKVLGLLKRQTTDEKEAPRIGMIRREYGLILSTCNKIKGQKILNTRRNTLLSLDVVMFNAFLSLLRTYGEIVFDLMVGGCLQSVNDRLVSPSLIIDLYNKKCTRNPQWLSKVMLKLNLLPGYIQEDFKVFVRPHLVELDLDLWSNYLELYSTTFERRLEIQYTVSEEEVHEKTDPEVIEWLEMKESTFKQYLDSLSTLSLGLVNSMKTSGTSRFHINQPNDYYGTVKCEECFFQSLHHAYGVSLLYQKTGERNRCYSLCSNSGKVGHIVSFYCDPKRFFLPIMSQQVLLSMTQEMLSWLDFIKGDDLNLISSMLRRLILSVLACPSKRVQLYLQGLRYFLMAYVNEIHHVQLLAKLEVEVKSRSEWATMTLADDLVVALLNMSNQPNMSKTFKFLLNVSYLCHLITKETPDRLTDQIKCFEKFMEPKIDFGSVIVNSSLNGNMTEEEESKILLDIDRLLSKQLNTSDQISKPGVNPTVMSLCCSLFNLGELDVNGKLKRDPQSPSFTSTALDMSSNKSVVVPKLDELGNPLSTYDYAAVVSSVIVDLSEGFKNKLRYKLDPHTLKYKIYKRFLSLVSDKTPKENKLEMSQDEFLDEITDEQLEMIEKIEMEVNECLSKAANVEPRIGTGPDDKNPLKSLWAKEILCVIESETSKHEVKDFDYTLFHHETYKELVELVFNSNSRNQYFTDRILNPCPLEYLMKNLCRKYYEEEDYFECFKYILVSTGFDNKVGRYDHKNMCRLGFKQSATRIREDARISCRESNSESILKRLDKSFFTNSSLRNLCFYSEESPTAFDSVSSDLGRLKFGLSYKEQVGGNRELYVGDLNTKLMTRLIEDYFECLMEKMKYTCLNNEAEFERALLDMKSVVRRSGFTVSMDHSKWGPHMSPVIFSQLFKALQFSLPDGSQIDKEPILNLLSWHIHKVVEVPFNVVHAYTKGYLKRLCGLMDNRTSKTEDFMDKFFADEVIPSHISSVLDMGQGILHNVSDFYGLITEQFISYALQTCVGVLSMAFTSSDDEILLGVTNDLKNQDESLDIDKSLEFLEFHNYLSATLNKFISPKTVAGTFACEFKSRFYIWSQEVPLLTKFTAAALHNVKAKAPNQLCETIDTIQDQCVANGVSVEVVGAISKRTNNIIKYSGHPSNPFLCLNDMDVKDWVDGSRGYRLQRSVENVYNDDEIPEYVRDMAARLFYLIRNGQVQEEYLISSMQSDPDECFTLLAGILGVPEQNISRLLDIRWLNLRAHGDLRMVLRTKLMGSNRVIQREEVPSLIKSVQSKLSKNFVRGARKIITDAVNKSAFQSCIAAGFVGICKSMGSKCVRDGKGGFMYIKDILSKIQYHKNCDVCKVSSGIYCKESLKAVSDFSRPLFWDYFALVLTNACELGNWVFSKPKIPDVVYKLDNPNFFWPVKPASHTELEDKIGMNHVLYSIKRNYPDIFEEHLAPYLTDLNTLKLSWVQKVKFLDICVAIDMVSESLGIISHMIKRKREELYIVKQNEQSMSHTRESQELAGGFRVTNEQICHNFLLQILFDSMITPVLLTSSQFKKYFWYGEVELLPNDCEHPLGQLTQFIMDCKKLNLSRAMNLDDLDVGFVHSTIKLSDVFLNFSTFLTKVDWENRKDYNNLEELLKSTLESQLVLSIGLTFTHLRRSLKYKYERSTVYTIIAKVILDIEQLTLNEDDQICLIVQEVECYVSQSGGDHISLDGAALIPLTPIISGTETLCLDEVAIRQDDMLKGVSKHLGNVKLDFSSHIKELKNKFSYKIQGPQVGMNPLHIDKGIIMEGDKVVSRLDVNVTAKSLFMALELLTDDELIRKFLRSLFYYLKSVKKGTALISLLSSDLKDIAEVYFNHFKDILKEEADWVSFGSFQLVYSKSLDTIMIGDEKGEFRLKGVNCKRLIPVIPAVQEIE

SEQ ID NO: 109 - protein, 510 aa, Pirital virus (PIRV)
  Amino acid sequence of glycoprotein precursor (GPC) protein of Pirital virus (PIRV)
MGQFITLMQSIPEALNMAFNVALVIVSLLCVTKGLINLWKCGIIQLLMFLALAGRSCDGEYKIDRRHVLSHVEFNLTRMFDNLPQSCSINNTHHYYKGPENTTWGVELTLTNTSVMNRSDENVTSIRSLGFGNITNCDKTGEAGHTLKWLLNELHFTVLHVTRHIGALCRTTAGAGLLIQYNLTTSDKGGEVGRHLIASLAQIIGDNKAAWVGKCYNNCTSSGKCSLTNCEGGTHYKFLVIQNTTWPNHCSYSPMSTVRMIIQKTAYSSVSRKLLGFFTWDISDSSGQHVPGGYCLEQWAIVWAGIKCFDNSVMAKCNKDHNEEFCDTMRLFDFNQNAIKTLQLNVENSLNLMKKSINGLISDSLVIRNSLKQLAKIPYCNYTKFWYVNDTITGKHSLPQCWLVSNGSYLNETHFKNEWLWESQKLYNDMLLKEYEERQGNTPLALADLCFWSLVFFTTTVFFQLIGIPTHRHLIGEGCPKPHRLTSNSLCSCGFYKIPKKPFRWVRKGK

SEQ ID NO: 110 - protein, 560 aa, Pirital virus (PIRV)
  Amino acid sequence of nucleoprotein of PIRV
MASDNVASFRWTQALRRGLSNWTNPVKSDVITDTRALLAALDFDRVAQVQRLMRKDKRTDTDLTKLRDLNKEVDALMNMRTTQKDNVLRVGGLSKDELMELASDLQKLKKKVLRVEGSGQPGVYAGNLTTTQLEQRSKILRDMGFAQLRGNPSGVVKVWDIKDSSLLINQFGSMPAVTMACMTEQGGESLNDVVQGLSALGLLYTVKYPNMSDLEKLADQYPCLGYITQEQSQINVSGYNLSLSAAVKAGACMLDGGNMLETIQVKPTMFSSMIKAVLEVKSKERMFVSEAPGQRNPYENLLYKLCLSGDGWPYIGSRSQVKGRAWDNTTVDLTDTGSPNHPPVRNGGSPRLSQLSHAKEEQILEGLKRLDSKATTWIDIEGTPNDPVELAIFQPESGNYIHCYREPHDVKSFKDQSKYSHGMLLKDLTNTQPGLISFIIKNLPAGIVLTAQGSDDIEKLLEMHARRDISIIDVRLTSEQARQFEDKVWDKFGILCNKHKGIVLARKKKGSPPGSKNPHCALLDCIMFCSTIGGFVDDKKPTRLLPLDLLYREQASLIEL

SEQ ID NO: 111 - protein, 95 aa, Pirital virus (PIRV)
  Amino acid sequence of Z protein of PIRV
MGLRYSKEVRERHGDKDLEGRVPMTLNLPQGLYGRFNCKSCWFANRGLIACSDHYLCLNCLTRLRSQSQFCGICGKPLPTKIRFEESPSAPPYEP

SEQ ID NO: 112 - protein, 2210 aa, Pirital virus (PIRV)
  Amino acid sequence of L protein of PIRV
MEEHVNELHDLVRKWVSDDENFAEQKAIFLSQTKLRAITIEGLKLLSTIVEVDSCQKNSCIHNREKTLNSILRDNKIVCPTLPEIVPDGYRLIGDVLILLEVFVRSNQESFEKKYEQDYTKLMQVKKDLQSHGITLVPMIDGRSSYYVEFMPDWVVEKIRWHLIKLMDLLKEDGESVEELEYERLVSSLSALENQSLGLESLLSIKERGIEYIDRLTKIMYGNLNNNMSVDECKGEILRIYQNFRQLFDQGQFKPKYRKTDREFILKTLREHGLIKCAIMSEEDSCKNCMIHMFKVLTIIKQSFVSNKNIESSFILKEYNQLLSVCNKVKSLKVLNTRRGTLMVLDLIMLNKLLSLIKIYGIKAALTILRMQCIPAVNDRLLSIDFLISIYERKMIKSPKWLEKVHGKLKRVVQDCMFKALEDYLVEIDFDTWFSIKDELLMTQQFKPSICYRSSKGCVCNAETLKNLSMMTEEDFLSYLKILSSLSLSLVNSMKTSSAPKSKINQANDFYGIVHCEEVYFQGFGDNNACTLLYQKTGEKSRCYSVAFSDNEQQIDYGSKISFYADPKRFFLPIMSQDVLNRMCNEMLSWLDFLSDDNIKVVADLLRKLILCVLCTPSKRVQVYLQGFRYLIMAYVNEIHCNDLFAKLEVDALTASERQVMIWMDDLTRIVLEMSKEADMAKSFKFILNLSYLCHLITKETPDRLTDQIKCFEKFLEPKLKFGSLMVNPDSTPELTSEQEDQVCEGLHRLLNKKIFSKCENIPGVSKELVSLCSSLFNSSNLEVKPLLNHDPLTPSFTSTALDLSSNKSVVVPKLNEIGETLTEYDFGKIVSSVVVDLTEHFKTKGKYKLDPRDLRFRIFKKLSSLVEVNPTKKSNRKSESGEVVAPDESFMDELTEEQQLMLSEIEVKVSKTFEGMSKDELNRKQSKEKGAEAHLKRLWSKEVRDKISSETSLHEVKDFDVQLFPFDTYEELVTIVFNDKSAHDFYFLEKYLNPCPLDMLMKNLTLKAFNEGDFFECFKYILIASEFDNKIGRYDHKIRTRLGLKDPALKIREEARISTRESNSESIAKRLDKSFFTNSSLRNLCFYSDESPTTRTGVATDVGKLKFGLSYKEQVGGNRELYVGDLNTKLITRLVEDYAESICSNMKYTCLNSESEFERALLDMKSVVRQGGFAVSMDHSKWGPHMSPAIFAQLLRCLKFRLKDGSEIDKKAVLNILYWHLHKIVEVPFNVVQAFMSGFVKRGLGLMDRGGATLSEEFMFGFFEKGVVPSHLSSVVDMGQGILHNMSDLYGLITEQFINYVLDFCYNVSMTSYTSSDDEIMLSTSSALNHEDGSLNVDVALEILEFHNFLSDKLNKFVSPKTVAGTFASEFKSRFFIWSQEVPLLTKFVAAALHNIKAKAPNQLAETVDTILDQCVANGVSIEIVGAISKRTNSLVCYSGHPLNPFLCLEESDVRDWVDGSRGYRLQRSIENIFPDDLCPNLIRDACRKVFHRIQSGKIEEEFLVASIQGSPDECLNSMLTIADVDEDIKKDLAGYRWLNLRAYGDLRLVLRTKLMSSTRTLQREEIPSLVRSVQSKLSKNFVRGAKRILTDAINKSAFQSCISSGFIGVCKSMGSKCVRDNTGGFVYIKEITKHVMPHTTSYCPYCKPSKNIYCEDALRSVSEYSRPIFWDYFSLVLSNACELGNWVFGAPILPKTVFHLDNPNHFWPIKPSSQTELEDKVGMNHVLYSIRRNYPSIFDEHISPYMSDLNMLRLSWVQKIKFLDLCVALDMSSECLGIISHIMRRKREELYIVKQQELSMSHTRESTNLESGLSLEPQEVCKNFLLQVLFDSMVNPVLLTTSQFRKYFWYGEVLQLPNDASHHLAQFTQFILDCKQLNSSRAMTLDDLDVGYVTSRVKRTTTFVALSTFITSLDWENRHEYKSFQELILSSPCDVFKFEFSMTFSHIRSSHKFRYERCTSYILKVHVVFDKRVLNSNMLEDQSLLITPHSVEYFVSQSGGNHISLDGVGLLPLDPLISGKEVLNIDDVLRHEDVNFSAESPLFSKMRFDFKPFLKELKNKFSYKLIGPDIIMEPLVLDKGQIKEGSRIVSQLKLRLDFKAVFVALGCLEEESRSTFISNLFMYIGSLRGEEHRISMTESNLVQLIDNYPQVFDSMLDATNDWLNCGSFSLCKSKSLGCVMIADERGPFKLKGVNCRRLLPDSQAVEID

SEQ ID NO: 113 - protein, 488 aa, Sabia virus (SABV)
  Amino acid sequence of glycoprotein precursor (GPC) protein of Sabia virus (SABV)
MGQLFSFFEEVPNIIHEAINIALIAVSLIAALKGMINLWKSGLFQLIFFLTLAGRSCSFRIGRSTELQNITFDMLKVFEDHPTSCMVNHSTYYVHENKNATWCLEVSVTDVTLLMAEHDRQVLNNLSNCVHPAVEHRSRMVGLLEWIFRALKYDFNHDPTPLCQKQTSTVNETRVQINITEGFGSHGFEDTILQRLGVLFGSRIAFSNIQDLGKKRFLLIRNSTWKNQCEMNHVNSMHLMLANAGRSSGSRRPLGIFSWTITDAVGNDMPGGYCLERWMLVTSDLKCFGNTALAKCNLDHDSEFCDMLKLFEFNKKAIETLNDNTKNKVNLLTHSINALISDNLLMKNRLKELLNTPYCNYTKFWYVNHTASGEHSLPRCWLVRNNSYLNESEFRNDWIIESDHLLSEMLNKEYIDRQGKTPLTLVDICFWSTLFFTTTLFLHLVGFPTHRHIRGEPCPLPHRLNSRGGCRCGKYPELKKPITWHKNH

SEQ ID NO: 114 - protein, 58 aa, Sabia virus (SABV)
  Amino acid sequence of GP signal peptide of SABV
MGQLFSFFEEVPNIIHEAINIALIAVSLIAALKGMINLWKSGLFQLIFFLTLAGRSCS

SEQ ID NO: 115 - protein, 196 aa, Sabia virus (SABV)
  Amino acid sequence of GP1 of SABV
FRIGRSTELQNITFDMLKVFEDHPTSCMVNHSTYYVHENKNATWCLEVSVTDVTLLMAEHDRQVLNNLSNCVHPAVEHRSRMVGLLEWIFRALKYDFNHDPTPLCQKQTSTVNETRVQINITEGFGSHGFEDTILQRLGVLFGSRIAFSNIQDLGKKRFLLIRNSTWKNQCEMNHVNSMHLMLANAGRSSGSRRPL

SEQ ID NO: 116 - protein, 234 aa, Sabia virus (SABV)
  Amino acid sequence of GP2 of SABV
GIFSWTITDAVGNDMPGGYCLERWMLVTSDLKCFGNTALAKCNLDHDSEFCDMLKLFEFNKKAIETLNDNTKNKVNLLTHSINALISDNLLMKNRLKELLNTPYCNYTKFWYVNHTASGEHSLPRCWLVRNNSYLNESEFRNDWIIESDHLLSEMLNKEYIDRQGKTPLTLVDICFWSTLFFTTTLFLHLVGFPTHRHIRGEPCPLPHRLNSRGGCRCGKYPELKKPITWHKNH

SEQ ID NO: 117 - protein, 562 aa, Sabia virus (SABV)
  Amino acid sequence of nucleoprotein of SABV
MSNSKEIPSFRWTQSLRRGLSEFTTPVKTDVLRDAKMILDGLDFNQVSLVQRILRKSKRNDGDLDKLRDLNKEVDNLMSMKSSQRDTILKLGDLNKSELMDLASDLEKLKRKVGQTERSASGGVYLGNLSQSQLTKRSDLLRKLGFQQQQVRSPGVVRIWDVADPNRLNNQFGSVPALTIACMTKQSDNTMGDVVQALTSLGLLYTVKFPNLIDLEKLTAEHDCLQIVTKDESGLNISGYNYSLSAAVKAGATLLDGGNMLETIRITPDNFSQIIKTTLSIKKKEGMFVDEKPGNRNPYENLLYKICLSGEGWPYIGSRSQIKGRSWENTTVDLSTKPQQGPRTPEKAGQNIRLSHLTELQESVVREAMGKIDPTLTTWIDIEGTSNDPVELALYQPDTGNYILCYRKPHDEKGFKNGSRHSHGMLLKDLESAQPGLLSYVIGLLPQNMVLTTQGSDDIRRLVDTHGRKDLKIVDIKLASEQARKFEEPIWSDFGHLCKKHNGVIVPKKKKDKDIPQSSEPHCALLDCLMFQSAIAGQPPQTKLEGLLPDALLFTLEAAFTI

SEQ ID NO: 118 - protein, 100 aa, Sabia virus (SABV)
  Amino acid sequence of Z protein of SABV
MGNSKSKSKLSANQYEQQTVNSTKQVAILKRQAEPSLYGRHNCRCCWFANTNLIKCSDHYICLKCLNIMLGKSSFCDICGEELPTSIVVPIEPSAPPPED

SEQ ID NO: 119 - protein, 2212 aa, Sabia virus (SABV)
  Amino acid sequence of L protein of SABV
MQDPLLGTLSELKDLVRKTIPDVIELAYQKDALLSQVHPRSVLIEGFKLLSLLVELESCKVNACHHNYEQKFIDVILSDGGILCPTLPKVVPDGYNLMGKTLILLETFVRVNPDDFEKKWKADMSKLISLKTDLGKIGVTLVPVVDGRSNYNTSFVSDWTTERLRWLLIEVLKGMKTTSELEIEEQEYHRLIHSLAKTNNQSLGFENLECLKRNMLSYDQLLDSSLLVGVKNDVKESKVMEELIRLKIWYKSEVYEKGLGKFVKTDKKVLLSQLITLGSHEENDSLDCAFCSSRILELCFKLSVKMHEDVLTRGLNLDGTKTLHSSVQSYLNVLSMCNKIKGSKIFNTRRNTLLFLDLIMLNFVVDEMVKDSTVIRNLKNAGLIVGQMILLVNDRVLDILTANKLIRQKLTTNEKWLSICSSVLKRYDLELWEKLCYLIRVPDFNELFQLAKELVSDRPMMRYSVHKAEERQCCHKAMENFTDDDFKIMLKALSHLSLGLINSMKTSFSSRLLINERDYSRYFGNVRLRECYIQRFPITNNIIGLLFYQKTGERSRCYSLYIAENGELTEIGSFYCDPKRYFVPIFSEAVITSMCEEMINWLNFDSELVRIVSTQLKTLMLLLLCSPSKRNQTFLQGLRYFIMAYVNQAHHIDLMSKLAVECKSSSEIQLQRLCVRLFVSILSGDNEIEYGFTRRFKFLLNISYLCHFITKETPDRLTDQIKCFEKFLEPKLKFNSVIVNPSLNGTLTESQEHQMISSIDRFFSKELLDQSDVKEPGVSRELLGYCVSLFNRGKLRVSGDLKVDPFRPTFTSTALDISSNKSVVVPKLDELGNIVDKYNKQLMVSSCVTSLVEMFKTKGRYNLDPDSIDFLVLKNLTNLVSANVPQEKSQEELSTLYEALTEDQISAFEQVRDEVQLALHKMKSSDAREERLQDPKRNEKNASKGKILESLWSPHQVNRAIKNETSIHEIKDFDPDILDSHLVEKLCHEVYNSSQKSLFFLDEPLKSVPLEMLLINLTTIAYEEEEFFECFKYLLIQGDFDQKLGTYEHKSRSRLGLSSEALKVQENARVSTRESNAEAIAKKLDRTFFTSAALRNLCFYSEDSPTEFTSVSTNTGNLKFGLSYKEQVGSNRELYVGDLNTKLMTRLVEDFSEVVTGSMRFSCLNSEKEFERAICDMKMAVNNGDFSLSMDHSKWGPHMSPALFFTFLANLNLTEPKSRTRLNLDPLLNILKWHLHKTVEVPFNVAQAYCIGKLKRSLGLMECQCSSLTEEFYHSYLQIQDEIPSHIMSVLDMGQGILHNLSDLYALITEQFLNYVIHKLFDIDVTSYTSSDDQISIMKLPLSTKENDEDFDWLEIICFHEYLSSKLNKFVSPKSVVGNFVAEFKSRFFVMGEETPLLTKFVAAALHNVKCKTPTQLAETIDTICDQCVANGVGVDIVSRISERVNRLISYSGYKETPFLTIVNQDVKDWTDGSRGYRLQRNIENSFGNQELLRLIRRGARKVFLEIKKGHVFEENLIGLIGRGGDEALRGFLLYAGFAENDIVEALRHKWLNPSTFGDLRLVLRTKIMSSKRILERESVPSLIKTLQSRMSKNFIKGAKKILAESINKSAFQSSVASGFIGFCKSMGSKCVRDGKGGFMYLKELYNNVNKCGCCICLEWPGVVYCQDSLAKISQFARSILWDYFTLVLTNACEIGEWVFSDVKSPSAPPILSNPNLFWAVKPKIQKHIEDRLSLNHILHSIKRNYPYLFEEHLAPFMSDLQFNQMMNPSHVKFLDVCIALDMMNENLGIIGHLLRGRNHFIYIVKQSECASAHIRQSDYVDHELGLSPQQVCYNFKVQFLFSSMIDPLIVSTSTLKTFFWFNEVLSIEEEDQIDLGELTDFTLFIKTGHLNRAMTADDITMGYVCSNLAEEIITLNSYGSFQEFRSNHPSKNDLSDILKTLTSESIKLTLDIQIVHMRNSTKYNISRKIVYTLKALCALPLEDCFTKDPVALVESLELFASGVNGGHLQLDGVTMVSVLPLLRGKKAVNLAQILMDNDLAATNDHNVMESVTLDFTKFHDELGDKFCYSLVGPEDQGNPIVLHNGMFMIDNQKLSYLKVEIFGDTIIKALGALDSPREIGSLLHGLWPYLKATKQIINFDQTDFEMIYDLHRVVLLESIAQFGDWVEFASFKVAFSKHYKDIVVADNLGNLRLKGVTCRLFRQQQSVEDIE

SEQ ID NO: 120 - protein, 495 aa, Tacaribe virus (TCRV)
  Amino acid sequence of glycoprotein precursor (GPC) protein of Tacaribe virus (TCRV)
MGQFISFMQEIPIFLQEALNIALVAVSLICIVKGLVNLYRCGLFQLMVFLVLAGRSCSEETFKIGMHTKFQEVSLSLSALLTNQSHELPMLCLANKTHLYLKSGRSSFKINIDSVTVLTRSEVNLTSINLTRSIDVFVHSPKLGSCFESDEEWVVAWWIEAIGHRWDQDPGLLCRNKTKTEGKLIQINISRADGNVHYGWRLKNGLDHIYRGREEPCFEGEQCLIKIQPEDWPTDCKADHTNTFRFLSRSQKSIAVGRTLKAFFSWSLTDPLGNEAPGGYCLEKWMLVASELKCFGNTAIAKCNQNHDSEFCDMLRLFDYNKNAIKTLNEETKTRVNVLSHTINALISDNLLMKNKIRELMSVPYCNYTRFWYVNHTLSGQHSLPRCWMIRNNSYLNSSEFRNEWILESDFLISEMLGKEYSERQGRTPITLVDICFWSTVFFTSTLFLHLIGFPTHEHIRGEGCPLPHRLNSMGGCRCGKYLPLKKPTIWHRRH

SEQ ID NO: 121 - protein, 58 aa, Tacaribe virus (TCRV)
  Amino acid sequence of GP signal peptide of TCRV
MGQFISFMQEIPIFLQEALNIALVAVSLICIVKGLVNLYRCGLFQLMVFLVLAGRSCS

SEQ ID NO: 122 - protein, 203 aa, Tacaribe virus (TCRV)
  Amino acid sequence of GP1 of TCRV
EETFKIGMHTKFQEVSLSLSALLTNQSHELPMLCLANKTHLYLKSGRSSFKINIDSVTVLTRSEVNLTSINLTRSIDVFVHSPKLGSCFESDEEWVVAWWIEAIGHRWDQDPGLLCRNKTKTEGKLIQINISRADGNVHYGWRLKNGLDHIYRGREEPCFEGEQCLIKIQPEDWPTDCKADHTNTFRFLSRSQKSIAVGRTLK

SEQ ID NO: 123 - protein, 234 aa, Tacaribe virus (TCRV)
  Amino acid sequence of GP2 of TCRV
AFFSWSLTDPLGNEAPGGYCLEKWMLVASELKCFGNTAIAKCNQNHDSEFCDMLRLFDYNKNAIKTLNEETKTRVNVLSHTINALISDNLLMKNKIRELMSVPYCNYTRFWYVNHTLSGQHSLPRCWMIRNNSYLNSSEFRNEWILESDFLISEMLGKEYSERQGRTPITLVDICFWSTVFFTSTLFLHLIGFPTHEHIRGEGCPLPHRLNSMGGCRCGKYLPLKKPTIWHRRH

SEQ ID NO: 124 - protein, 570 aa, Tacaribe virus (TCRV)
  Amino acid sequence of nucleoprotein of TCRV
MAQSKEVPSFRWTQSLRKGLSQFTQTVKSDILKDAKLIADSIDFNQVAQVQRVLRKTKRTDDDLNKLRDLNIEVDRLMSMKSVQKNTIFKVGDLARDELMELASDLEKLKDKIKRTESNGTNAYMGNLPQSQLNRRSEILRTLGFAQQGGRPNGIVRVWDVKDSSKLNNQFGSMPALTIACMTVQGGETMNNVVQALTSLGLLYTVKYPNLSDLDKLIPNHECLQIITKEESSINISGYNLSLLAAVKAGASILDGGNMLETIRVSPDNFSSLIKNTLQVKRREGMFIDDRPGSRNPYENLLYKLCLSGDGWPYIGSRSQIMGRSWDNTSVDLTKKPDAVPEPGAAPRPAERKGQNLRLASLTEGQELIVRAAISELDPSNTIWLDIEDLQLDPVELALYQPAKKQYIHCFRKPHDEKGFKNGSRHSHGILMKDIEDAVPGVLSYVIGLLPPNMVITTQGSDDIRKLLDIHGRKDLKLIDVKFTSDQARLFEHQVWDKFGHLCKQHNGVIISKKNKSKDSPPSPSPDEPHCALLDCIMFHSAVSGELPKEEPIPLLPKEFLFFPKTAFAL

SEQ ID NO: 125 - protein, 95 aa, Tacaribe virus (TCRV)
  Amino acid sequence of Z protein of TCRV
MGNCNRTQKPSSSSNNLEKPPQAAEFRRTAEPSLYGRYNCKCCWFADKNLITCSDHYLCLRCHQIMLRNSELCNICWKPLPTSIRVPLEASAPDL

SEQ ID NO: 126 - protein, 2210 aa, Tacaribe virus (TCRV)
  Amino acid sequence of L protein of TCRV
MDETVSELKDLVRKHIPNRHEFAHQKDAFLSHCHSGSLLQEGFKLLSNLVELESCESHACHLNTCQKYVDVILSDHGIPCPTLPKVIPDGFKLTGKTLILLETFVRVNPEEFERKWKSDMTKLLNLKQDLLRSGITLVPVVDGRTNYSNRFTPEWVVERIRWLLIEILRKSRSSAEIDIEDQEYQRLIHSLSNVRNQSLGFENIECLKRNLLEYDDRLAKSLFVGVKGDVRESVIREELMKLRLWYKKEVFDKNLGKFRITNRSELLNNLIRLGKHEDNTTSDCPFCVNKFMDIIYSLTFTALKRQDREKSNSELDQYVVCPHEKAYLGVLSICNKIKGLKVFNTRRNTLLFLDLIMVNFLDDLFTAKPEALDSLRRSGLILGQMVTLVNDRALDFLEAVKLIKKKIETNVKWVENCSKILRRSQQDIWSQISVWARYPDLSKLISIAQTISSDRPIMRYSAGGNFNTECKHKTFHMMSDAEQVEAFKILSSVSLSLINSMKTSFSSRLLINEKEYSRYFGNVRLRECYQQRFFLTDGLIVILFYQKTGERSGCYSIYTCEDGVLVEKGSFYCDPKRFFLPIFSQEVLVEMCDEMTTWLDFNSDLMVISKEKLRLLLLSILCAPSKRNQVFLQGLRYFLMAYSNQFHHVDLLSKLKVECMSGSEVIVQRLAVDLFQCLLGEGVDSDPYFARRFKYLLNVSYLCHLITKETPDRLTDQIKCFEKFIEPKIDFNCVIVNPSLNGQLTEAQEGMMLDGLDKFYSKTLKDCSDTKLPGVSNELLSYCISLFNKGKLKVTGELKNDPFKPNITSTALDLSSNKSVVVPKLDELGNVLSVYDREKMISSCVSSMAERFKTKGRYNIDPSTLDYLILKNLTGLVSIGSKTQRDCEELSMMFEGLTEEQAEAFNDIKNSVQLAMVKMKDSKSGDVNLSPNQKEGRVKSSTGTLEELWGPFGIMREIRTEVSLHEVKDFDPDVLASDLYKELCDVVYYSSSKPEYFLERPLEVCPLGLLLKNLTTSAYFDEEYFECFKYLLIQGHYDQKLGSYEHRSRSRLGFTNEALRVKDEVRLSMRESNSEAIADKLDRSYFTNAALRNLCFYSDDSPTEFTSISSNNGNLKFGLSYKEQVGSNRELYVGDLNTKLITRLVEDFAEAVGSSMRYTCLSSEKEFDRAICDMKLAVNNGDLSCSLDHSKWGPTMSPALFLTFLQFLELRTPKERNIINLEPVLNVLRWHLHKVIEVPVNVAEAYCTGNLKRSLGLMGCGSSSVGEEFFHQFMPVQGEIPSHIMSVLDMGQGILHNMSDLYGLITEQFLNYVLDLLYDVIPTSYTSSDDQVTLIKLPCASDDNQVNDEWLEMLCFHEYLSSKLNKFVSPKSVAGTFVAEFKSRFFVMGEETPLLTQFVAAALHNVKCKTPTQLSETIDTICDQCVANGVSVQIVSKISQRVNQLIKYSGFKETPFGAVEKQDVKDWVDGTRGYRLQRKIESIFSDDEMTGFIRSCAKRVFNDIKRGKVFEENLISLIGRDGDDALVGFLRYSSCSEQDIMRALGFRWVNLSSFGDLRLVLRTKLMTSRRVLEREEVPTLIKTLQSRLSRNFTKGVKKILAESINKSAFQSSVASGFIGFCKSIGSKCVRDGEGGFLYIKDIYTKVKPCLCEVCNMKRGVIYCRPSLEKIEKFSKPILWDYFSLVLTNACEIGEWVFSSVKEPQIPVVLSNRNLFWAVKPRIVRQLEDQLGMNHVLYSIRKNYPKLFDEHLSPFMSDLQVNRTLDGRKLKFLDVCIALDLMNENLGIVSHLLKARDNSVYIVKQSDCAMAHVRQSDYVDKEVGLSPQQVCYNFMVQIILSSMVNPLVMSTSCLKSFFWFNEVLELEDDGQIELGELTDFTFLVRDQKISRAMFIEDIAMGYVISNLEDVRLYIDKITIGEQPLAPGRHINDLLDLLGNFDDHEDCDLRFLIQVEHSRTSTKYRFKRKMTYSFSVTCVSKVIDLKEASVELQVVDVTQSVSGSGGSHLLLDGVSMIAGLPIFTGQGTFNMASLMMDADLVETNDNLILTDVRFSFGGFLSELSDKYAYTLNGPVDQGEPLVLRDGHFFMGTEKVSTYRVELTGDIIVKAIGALDDPEDVNALLNQLWPYLKSTAQVMLFQQEDFVLVYDLHRSGLIRSLELIGDWVEFVNFKVAYSKSLKDLVVSDNQGSLRLRGIMCRPLARRNTVEDIE

SEQ ID NO: 127 - protein, 483 aa, Bear Canyon virus (BCNV)
  Amino acid sequence of glycoprotein precursor (GPC) protein in Bear Canyon virus (BCNV)
MGQLVSFIGEIPAIVHEALNVALIAVSIIAIMKGLINIWKSGLFQLIMFLILAGRSCSISIGHHLELQHFIINSTSLLPSMPTLCRINATNSLIRGPFSAQWGLDIFIGDLTILVNPEPGSKTKRMTATNITGCFPNNEDPDSVAQVLSWFFRGVHHDFHLDPTILCDESVTVFRIQMNLTERMYCDRIVSKLARLFGSFGDYCSKVGKKLVIIRNVTWSNQCHEDHVGSMQLILQNAHNQVMRFRKLQNFFSWSLVDSAGNSMPGGYCLEKWMLVASELKCFGNTAVAKCNINHDSEFCDMLRLFDYNKKAIVNLQDKTKAQLDSLIDAVNSLISDNLITKNKIRELMNIPYCNYTKFWYVNHTGLNVHSLPKCWHVRNGSYLNESDFRNEWIIESDHLVSEILAKEYEERQKRTPLSLVDLCFWSTLFYTASIFLHLLHIPTHRHIIGEGCPKPHRLTSDSLCACGFFQLKGRPTRWARIP

SEQ ID NO: 128 - protein, 58 aa, Bear Canyon virus (BCNV)
  Amino acid sequence of GP signal peptide in BCNV
MGQLVSFIGEIPAIVHEALNVALIAVSIIAIMKGLINIWKSGLFQLIMFLILAGRSCS

SEQ ID NO: 129 - protein, 191 aa, Bear Canyon virus (BCNV)
  Amino acid sequence of GP1 protein in BCNV
ISIGHHLELQHFIINSTSLLPSMPTLCRINATNSLIRGPFSAQWGLDIFIGDLTILVNPEPGSKTKRMTATNITGCFPNNEDPDSVAQVLSWFFRGVHHDFHLDPTILCDESVTVFRIQMNLTERMYCDRIVSKLARLFGSFGDYCSKVGKKLVIIRNVTWSNQCHEDHVGSMQLILQNAHNQVMRFRKLQ

SEQ ID NO: 130 - protein, 234 aa, Bear Canyon virus (BCNV)
  Amino acid sequence of GP2 protein in BCNV
NFFSWSLVDSAGNSMPGGYCLEKWMLVASELKCFGNTAVAKCNINHDSEFCDMLRLFDYNKKAIVNLQDKTKAQLDSLIDAVNSLISDNLITKNKIRELMNIPYCNYTKFWYVNHTGLNVHSLPKCWHVRNGSYLNESDFRNEWIIESDHLVSEILAKEYEERQKRTPLSLVDLCFWSTLFYTASIFLHLLHIPTHRHIIGEGCPKPHRLTSDSLCACGFFQLKGRPTRWARIP

SEQ ID NO: 131 - protein, 562 aa, Bear Canyon virus (BCNV)
  Amino acid sequence of NP protein in BCNV
MSDQVVHSFRWTQSLRRGLSNWTCPVKADVLNDTRALLSGLDFAKVASVQRMMRRDKRDESDLTSLRDLNKEVDSLMTMKSTQKNMFLKVGSLSKGELMELSGDLNKLKDKVQRTERPPGSGGQYQGNLTTTQLTRRGELLQFIGIQKAGRVGMNGVVKVWDVKDSSLMINQFGSMPALTISCMAEQGGETLNDVVQGLTDLGLLYTAKYPNLNDLEALSEKHPCLKVITQEESQINISGYNLSLSAAVKAGACLIDGGNMLETIKIDTSTFTTVIKTLLEVKARERMFVSSVPGQRNPYENILYKLCLSGEGWPYIASRSQIKGRAWDNTVVEFDSAPPRAPVPVRNGGAPLLGPLRPELEDQVRKGVEGLSPNLTTWIDIEGPPNDPVELAIYQPETQKYLHCYRRPNDIKSFKDQSKYCHGILLKDVENARPGLISTIIRYLPKSMVFTAQGEDDIKRLFDMHGRQDLKIVDVKLSAEQSRVFEELVWKKFEHLCDRHKGIVIKSKKKGSKPASTNAHCALMDCIMFNAVLVGFVADEKPKRLLPIDILFREPDTTVVL

SEQ ID NO: 132 - protein, 95 aa, Bear Canyon virus (BCNV)
  Amino acid sequence of Z protein in BCNV
MGLRYSREVKQRYGEKELEGRIPITLDMPQTLYGRYNCKSCWFANKGLIKCSNHYLCLKCLTAMLSRSDYCGICGGILPKKLVFETTPSAPPYTP

SEQ ID NO: 133 - protein, 2216 aa, Bear Canyon virus (BCNV)
  Amino acid sequence of L protein in BCNV
MSEYLDELKELIRKWIPDEEMYIEQKTSFLSQVNLRSVVIEGLKLLSIIIEIDSCKKHGCVHNKNKTVNQILRDHRIVGPTLPDVVPDGYRVIGSTIILLEAFVRVSHESFEIKYKSDFEKLMQLSKDLSRCGLTLIPVVDGRSNYYTEHFPDWTIERMRWLILKITNFLRDNGEEIEELEYSRLVYSLSNMENKNLGLESLKILKEEGLDYKAKLMSVMRDGVNSNMSASECRVEMAKIYDQFSFLRKNGLYKDVYCKTSRTEIINWLKDHKLILLSGETRTAMLDERQCGYCRNHMFRILASLIKNKRHYQSLTNPKKCGSIQSHKKLLSDCNKIKGLKVLNTRRFTLLCLDVIILNSLLELIDAGEIDNEFLVNNHFKSVNDRLVSIDLIIDRLNKKLMSKPNWIGSVKYKMKRTLEIHGLYYVSKWLKQVDIDSWYEFKMMREHSDKCVKPTLKYKKDAARKCGQPEFGSSTILDDEVFLEYLEALSTLSLGLVNSMKTSSAAKFLINDKSNYFGTVQCNECYFQDLDKSYNSLLIYQKTGERSRCYGLMFKSEQFENVYEVGESFYADPKRFFLPIMSSEVILKMCVEMLSWLDWLSEQELKAFKSKLYTLIINILTVPSKRVQVYLQGFRYLIMAFVNELHFKELQNKLKVQPLTISECYVFTLMDDLVHLLLTEAQEENMSKVFRFVLNLSYLCHLVTKETPDRLTDQIKCFEKFLEPKVDFNSVFVNLDSSPHLSGEVEEKFIKDLNRLFSKDLGVEDLKDPGISKELISLCASCFNCGLLPMSKVLKHDPQSPSFTSTALDISSNKSVVVPKLDEVGETVTQYDYQSLLSSTVVDMAQSFKDKLKYKLDRKSIQFAIFKRLTNMVLKRKTDHDVKDDLDDELSEIVDDDTLRVINDVEANVSECLSKMGKISRAATVGGQNNLGRFEKIDTLKRLWDRESMNFILMETSLHEVKDFDPSIFPIEKYKSMCELVYDSKMKSEFFTDEVLKFCPLDLLVKNLATKCYLEEDFFECFKYILISAGFDNRVGRYDHRSRSRLGFKDEAILIKENSRISSRESNSEAISRRLDKSFFTNSSLRNLCFYSEESPTYRSTVSSSVGKLKFGLSYKEQVGSNRELYVGDLNTKLTSRLIEDYFESLTSECKFSCLNNDAEFERALLDMKCVVRLSGLAVSMDHSKWGPYMSPAIFNILFSNLNLELNDGVFIDKAPIENLLNWHLHKIVEVPYNVIDAYLKGYTKRRLGLMDRSSTSITEDFIFNWFAKGVVPSHISSVLDMGQGILHNTSDYYGLLTEQFILQCLDFIFDIKSTAYTSSDDEILLSNSPSLKKVDEDSLDINKCQEVLEFHNYLSSKFNKFVSPKTVAGSFASEFKSRFFIWSQEVPLLTKFVAAALHNVKAKSPHQLAETVDTILDQCIANGVSIEVVKAISRRTNKLITYSGHPKNPFLCVENTDLKDWVDGSRGYRLQRSVESLFNDDDLPLTIRNSCRSLFHRIRSGDIQEEFLINALQTSPDECLAKMLRLSDVDESTIDKVLEFRWLNLRAHGDLRLVLRTKVMSGTRILDREEVPSLVKSVQSKLSKNFVRGAKKIITDAINKSAFQSSICSGFIGFCKSMGSKCVRDGNGSFQYIKHFLKSIILHSHCEVCKPEMSVFCRAALEELKPFSRPIFWDYFSLTFSNACELGNWVFSNVTIPKRTPTTVNPNFFWPVKPGSHTELEDKVNMNHVLYSIKRNFPDLFDEHIAPFLSDLNSLKISWIQRIKFLDLCVAMDMSSECLGIISHIMRRKREELYIVKQNELSVAHMRDSSPMEAGYQLNSSEICHNFLCQLVFESMLHPVLLTTGQFKKYFWFGEVELLPNEADHDLGQLTQFVMDCKTLNISRCMSLDDLDVGYVHSSILMGDIYVNFSSFLHLLDWENRRNYKTFDEIILCSREDTIPMEIDFTISHSRKSFKFKYERKTNYHIKSKVLVQKVDIEEAQNQGFDILELEVHEIECFVSGSQGNHISLDGVGLIPLHPLFSGKEFLDVNKLLIKQDENFESTHSVFSKVKLNFSNHTKDLKNKYSYKLQGPEYNMNPLHLYRGQIMENNFVISRLDVQITSRSVFLALEALESEDRIPFLISLHIYTRSNNKKENSCFIRMTQSDLCLLIDSYEKEFTEVLKSLSDWMDFGDFALCFSNNLNCIMIADPDGQFKLKGRQCRKVSSASAPLEID

SEQ ID NO: 134 - protein, 480 aa, Whitewater Arroyo virus (WWAV)
  Amino acid sequence of the glycoprotein precursor (GPC) protein of Whitewater Arroyo virus (WWAV)
MGQLISFFGEIPSIIHEALNIALIAVSIISILKGVINIWGSGLLQFIVFLLLAGRSCSYKIGHHVELQHIILNASYITPYVPMPCMINDTHFLLRGPFEASWAIKLEITDVTTLVVDTDNVANPTNISKCFANNQDERLLGFTMEWFLSGLEHDHHFTPQIICGNVSKGEVNAQVNITMEDHCSQVFLKMRRIFGVFKNPCTSHGKQNVLISVSNWTNQCSGNHLSSMHLIVQNAYKQMIKSRTLKSFFAWSLSDATGTDMPGGYCLEKWMLISSELKCFGNTAIAKCNLDHSSEFCDMLKLFEFNRNAIKTLQNDSKHQLDMIITAVNSLISDNTLMKNRLKELINIPYCNYTKFWYVNHTGFNVHSLPRCWLTKNGSYLNVSDFRNQWLLESDHLISEILSREYEARQGKTPLGLVDVCFWSTLFYVSSIFLHLLRIPTHRHIIGEGCPKPHRLSSNSVCACGLFKQKGRPLRWAGKV

SEQ ID NO: 135 - protein, 58 aa, Whitewater Arroyo virus (WWAV)
  Amino acid sequence of the GP signal peptide of WWAV
MGQLISFFGEIPSIIHEALNIALIAVSIISILKGVINIWGSGLLQFIVFLLLAGRSCS

SEQ ID NO: 136 - protein, 188 aa, Whitewater Arroyo virus (WWAV)
  Amino acid sequence of the GP1 of WWAV
YKIGHHVELQHIILNASYITPYVPMPCMINDTHFLLRGPFEASWAIKLEITDVTTLVVDTDNVANPTNISKCFANNQDERLLGFTMEWFLSGLEHDHHFTPQIICGNVSKGEVNAQVNITMEDHCSQVFLKMRRIFGVFKNPCTSHGKQNVLISVSNWTNQCSGNHLSSMHLIVQNAYKQMIKSRTLK

SEQ ID NO: 137 - protein, 234 aa, Whitewater Arroyo virus (WWAV)
  Amino acid sequence of GP2 of WWAV
SFFAWSLSDATGTDMPGGYCLEKWMLISSELKCFGNTAIAKCNLDHSSEFCDMLKLFEFNRNAIKTLQNDSKHQLDMIITAVNSLISDNTLMKNRLKELINIPYCNYTKFWYVNHTGFNVHSLPRCWLTKNGSYLNVSDFRNQWLLESDHLISEILSREYEARQGKTPLGLVDVCFWSTLFYVSSIFLHLLRIPTHRHIIGEGCPKPHRLSSNSVCACGLFKQKGRPLRWAGKV

SEQ ID NO: 138 - protein, 562 aa, Whitewater Arroyo virus (WWAV)
  Amino acid sequence of nucleoprotein of WWAV
MSDQSVPSFRWTQSLRRGLSAWTTSVKADVLNDTRALLSGLDFAKVASVQRMMRRVKRDDSDLVGLRDLNKEVDSLMIMKSNQKNMFLKVGSLSKDELMELSSDLEKLKQKVQRTERVGNGTGQYQGNLSNTQLTRRSEILQLVGIQRAGLAPTGGVVKIWDIKDPSLLVNQFGSVPAVTISCMTEQGGESLNDVVQGLTDLGLLYTAKYPNLNDLKALTTKHPSLNIITQEESQINISGYNLSLSAAVKAGACLIDGGNMLETIKIEESTFTTVIKTLLEVKNKEKMFVSPTPGQRNPYENVLYKLCLSGDGWPYIASRSQIKGRAWDNTVVEFDTATVKEPIPIRNGGAPLLTTLKPEIENQVKRSVESLLINDTTWIDIEGPPNDPVEFAIYQPESQRYIHCYRRPNDIKSFKDQSKYCHGILLKDVENARPGLISSIIRSLPKSMVFTAQGADDIRKLFDMHGRQDLKIVDVKLSAEESRIFEDLVWKRFEHLCDKHKGIVIKSKKKGSTPATTNAHCALLDGVMFSAVISGSVSNEKPKRMLPIDLLFREPETTVVL

SEQ ID NO: 139 - protein, 95 aa, Whitewater Arroyo virus (WWAV)
  Amino acid sequence of the Z protein of WWAV
MGLRYSKEVRDRYGDKEPEGRIPITLNMPQTLYGRYNCKSCWFANKGLLKCSNHYLCLKCLTLMLGRSDYCGICGEVLPKKLVFENSPSAPPYEA

SEQ ID NO: 140 - protein, 2219 aa, Whitewater Arroyo virus (WWAV)
  Amino acid sequence of the L protein of WWAV
MIDCSDRINELKDLVRRWVPDEEAYTEQKTIVLSQVNPSSVITEGLKLLSMLIEIDSCLKHGCVFNKNKTVNQILKDHKIVGPTLPDVVPDGFKVSGSTIILLETFVRVNQESFEQKYKYDFEKLMQLSKDLNKCGLILVPVIDGRSNYYVDRFPDWVIERIRWLLLKLMDSVKDSGESIEELEYNRLISSLSNMENQNLGLESLKALREEGLDYKAKLMGVIKDGTMSKMTASECRIGIAKIYDQFCLLRDSGQYQDVYCETSRADMIKWLKTHKLISPISNGEGGPLNSERCGFCQNHMLRVIAELVQSKRASCTQLPAESKETLRHKKLLSDCNKVKGLKVLNTRRHAILCLDVIVLNSLIEVIKSGVDSSHFLINNHYKSVNDRLLSVDLIINKLERKLLKQPDWLKIVGRKLNKSVKEQSLDYVTVWLKELDYEFWYEFKFEREHSGKCEKPTLRYKKQNQDTCYQVKFGTDKVLNEGMFVDYLDALSSLSLSMMNSMKTSSAPKLIINDEKNFYGTIQCEECYYQDLDNLYNSILLYQKTGEKSRCYGLMLKDEEMTNAYKTGPSFYADPKRFFLPIMSSTVILKTCLEMLSWLDWLSTAEINDVKTKLFTLVVNILITPSKRVQIYLQGFRYFIMAFVNEFHFKKLDQKLSVQALTSAEQHVFVLMDELVVYLLEEALEENMAKIFKFVLNLSYLCHFITKETPDRLTDQIKCFEKFLEPKIQFGSSFVNLDSSPNLCKEDEEKFIMNLNKLFSKDLGVDDMENPGICKTILSLCVSCFNCGILPINKVLDRDPQSPSFSSTALDISSNKSVVVPKLDEAGEVITHYDYQSLLSSVVVEMAQSFKDKLRFKLDRKSIQFAIYKRLTNMVLKRRSHPKDHDDECAEEFEELLDEGTYKLINDIESNVLECLNGMVTSPMKKDVKEQGAVRRYEGSDLLSTLWPRELMGPILAETSLHEVKDFDPSIFSDGTYQDLCHSVFNSKFKKHFFLDDVLRFCPLESLVKNLATKNYIEKDYFECFKYILISAGFDNRVGRYDHRSRSRLGFKDAAYHVKEASRISLRESNSEAISKRLDKSFFTNSSLRNLCFYSEESPTFQSTVSSSTGKLKFGLSYKEQVGSNRELYVGDLNTKLTSRLIEDYFESITSESKFSCLNNELEFEKAILDMKSVVRLSGLAVSMDHSKWGPYMSPAIFNALFSNLDLQLKDGTSIDKGPIENLLNWHLHKLVEVPYNVIEAYLKGYTKRGLGLMDRMSNTICENFIFNWFARGVVPSHISSVLDMGQGILHNTSDYYGLVTEQFIMLCLEQCFDVKMSAYTSSDDEIILSNSFSLRNSDNESLNNLKCKELLEFHYYLSSKLNKFVSPKTVAGSFASEFKSRFFIWSQEVPLLTKFVAAALHNVKAKSPHQLAETIDTILDQCVANGVSIEIVKEISKRTNRLIKYSGHPIDPFLCVVDTDLKDWVDGSRGYRLQRSIESAIGDDTQLSIIRNSCKKLFFKIRSGNIQEEYLISALQSSPDECLRQMLSITEVNEQEIEDLVETRWLNLRTFGDLRLVLRTKIMSGTRILDREEIPSLIKSVQSKLSKNFVRGAKKIVTDAINKSAFQSSICSGFIGLCKSMGSKCVRDGTGGFVYIKMLLREIKDHQACGICKPKLSVFCKSALDRLPKYSRSLLWDYYSLVFTNACELGNWVFSEAMLPKRVPTMVNPNFFWCVKPGSHTELEDKVNMNHVLYSIKRNFPDLFDEHIAPFLSDLASLKISWVQRIKFLDLCVAMDMSSECLGVISHIMRRKREESYIVKQNELSHAHVRDSNPLEGGFQLNSLEICRNFLYQIIFESMLHPVLLTTSQFKKYFWYGEVELLPNDADHDLGQLTQFIMDCKTLNISRCMSLDDLDVGYVHSKITLSDIFINLSSFMHLLDWGSLNDYESFDDIILKTGQKQTPIEIGIVLSHIRRSFKFKYDRKTNYHIECRLIIDKDEMMMNRWDEDNILEIEVSEVQCFVSGSEGHHISLDGVGLIPLHPLFSGKELIDFNKLLVDQSVEFRQTSTVFQRVRLDFRQHTKDLRNKFSYKFQGPEQGLSPLHLYKGQIMERNTIVSRLDVPISSKSVFLALEALDPAEHTTFLTSLHTYMKTRMSKSNPCFIRMTQEDLCLLIESYEAAFIGVLKLESDWIEFGDFALCFSNSLNCIMIADDGGQFKLKGRKCRSASTCPRPLEIE

SEQ ID NO: 141 - protein, 59 aa, Allpahuayo virus (ALLV)
  Amino acid sequence of GP signal peptide in ALLV
MGQVVTFLQSLPEVINEAINIALIAISIICILKGLVNFWKCGVVQLAIFLCLAGRKCDG

SEQ ID NO: 142 - protein, 58 aa, Allpahuayo virus (ALLV)
  Amino acid sequence of GP signal peptide in ALLV
MGQVVTFLQSLPEVINEAINIALIAISIICILKGLVNFWKCGVVQLAIFLCLAGRKCD

SEQ ID NO: 143 - protein, 213 aa, Allpahuayo virus (ALLV)
  Amino acid sequence of GP1 protein in ALLV
LMIDRRHELSHVELNLTRMFDNLPQSCSKNNTHHYYKGPKGTTWGIELTLTNTSLDSYANMSRIRSLAFGNITNCDKTGEAGHTLKWLLNELHFNVLHVTRHVGARCRVSEGAGLLIQYNLTIGDHGGEVGRHLIASLAQIIGDNKAAWVGKCDSHCTMDGKCNYTNCEGFTHYNYLIIQNTTWENHCSYSPMSTIRMALNKVAYSSVSRQLL

SEQ ID NO: 144 - protein, 214 aa, Allpahuayo virus (ALLV)
  Amino acid sequence of GP1 protein in ALLV
GLMIDRRHELSHVELNLTRMFDNLPQSCSKNNTHHYYKGPKGTTWGIELTLTNTSLDSYANMSRIRSLAFGNITNCDKTGEAGHTLKWLLNELHFNVLHVTRHVGARCRVSEGAGLLIQYNLTIGDHGGEVGRHLIASLAQIIGDNKAAWVGKCDSHCTMDGKCNYTNCEGFTHYNYLIIQNTTWENHCSYSPMSTIRMALNKVAYSSVSRQLL

SEQ ID NO: 145 - protein, 59 aa, Flexal virus (FLEV)
  Amino acid sequence of GP signal peptide in FLEV
MGQVVTFFQSIPEIIQEAINIALIAVSVICIIKGCVNLWKCGLIQLMVFLLLAGKRCDA

SEQ ID NO: 146 - protein, 58 aa, Flexal virus (FLEV)
  Amino acid sequence of GP signal peptide in FLEV
MGQVVTFFQSIPEIIQEAINIALIAVSVICIIKGCVNLWKCGLIQLMVFLLLAGKRCD

SEQ ID NO: 147 - protein, 213 aa, Flexal virus (FLEV)
  Amino acid sequence of GP1 protein in FLEV
LNIDRRHVLSSVELNLTRMFDNFPQSCSKNNTHHYYKGPEGTNWGIELTLTNTSVANYTSMNRIRSLAFGNITNCDKTGEAGHTLKWLLNELHFNVLHVTRHVGARCMTTEGAGLLIQYNLTIGDHGGEVGRHLIASLAQIIGDNKAAWVGKCDSRCSNDGKCNYTNCEGYTHYNYLIIQNTTWAQHCTYSPLPSIRMALNKVAYSSVSRSLL

SEQ ID NO: 148 - protein, 214 aa, Flexal virus (FLEV)
  Amino acid sequence of GP1 protein in FLEV
ALNIDRRHVLSSVELNLTRMFDNFPQSCSKNNTHHYYKGPEGTNWGIELTLTNTSVANYTSMNRIRSLAFGNITNCDKTGEAGHTLKWLLNELHFNVLHVTRHVGARCMTTEGAGLLIQYNLTIGDHGGEVGRHLIASLAQIIGDNKAAWVGKCDSRCSNDGKCNYTNCEGYTHYNYLIIQNTTWAQHCTYSPLPSIRMALNKVAYSSVSRSLL

SEQ ID NO: 149 - protein, 235 aa, Flexal virus (FLEV)
  Amino acid sequence of GP2 protein in FLEV
GFFTWDISDSSGNHVPGGYCLEQWAVVWAGIKCFDNAVMAKCNKEHDVEFCDTMRLFDYNQNAIKTLQLNTENAVNLLKRSINGLISDSLVIRNSLKQLARIPYCNYTKFWYINDTVSGKHSLPQCWKVHNGSYLNESQFKNEWLLESDHLYSEMLLKEYEERQGRTPLALTDICFWSLVFFTSTVFLHLVGIPSHRHIVGDACPKPHRITKNALCSCGYYNLPGKQVRWVRKGK

SEQ ID NO: 150 - protein, 59 aa, Parana virus (PARV)
  Amino acid sequence of GP signal peptide in PARV
MGQLVTLFQSIPEIIEEAVNIALIAVAIMCIVKGTVNLWKCGIVQLCIFLLLAGKRCDG

SEQ ID NO: 151 - protein, 58 aa, Parana virus (PARV)
  Amino acid sequence of GP signal peptide in PARV
MGQLVTLFQSIPEIIEEAVNIALIAVAIMCIVKGTVNLWKCGIVQLCIFLLLAGKRCD

SEQ ID NO: 152 - protein, 213 aa, Parana virus (PARV)
  Amino acid sequence of GP1 protein in PARV
FQIDRRHKLESVEFNLTRMFNNLPMSCSKNNTHHYYKGPEGTNWGIELTLTNESVANYSNMSAIRSLAYGNITNCDKTNEAGHTLKWLLNELHFNVLHVTRHIGARCLTTDSAGILIQYNLTVGDYGGEVGRHLIASLAQIIGDDKAAWVGKCFNNCSANGTCRLTNCEGYTHYNYLIIQNTTWENHCSYSPMSTIRMALNKVAYSSVSRKLL

SEQ ID NO: 153 - protein, 214 aa, Parana virus (PARV)
  Amino acid sequence of GP1 protein in PARV
GFQIDRRHKLESVEFNLTRMFNNLPMSCSKNNTHHYYKGPEGTNWGIELTLTNESVANYSNMSAIRSLAYGNITNCDKTNEAGHTLKWLLNELHFNVLHVTRHIGARCLTTDSAGILIQYNLTVGDYGGEVGRHLIASLAQIIGDDKAAWVGKCFNNCSANGTCRLTNCEGYTHYNYLIIQNTTWENHCSYSPMSTIRMALNKVAYSSVSRKLL

SEQ ID NO: 154 - protein, 235 aa, Parana virus (PARV)
  Amino acid sequence of GP2 protein in PARV
GFFTWDISDSSGRHVPGGYCLEQWALVWAGIKCFDNSVMAKCNKDHNEEFCDTMRLFDFNQNAIKTLQLNTENSINLLKRSINGLISDSLVIRNSLKQLARIPYCNYTKFWYVNDTITKRHSLPQCWLTYNGSYLNETHFRNDWLLESQQLYNDMLVKEYEERQGKTPIALTDICFWSLVYFTVSVFLQLVGIPSHRHIVGQGCPKPHRISRNGLCSCGYYNIPMKPVRWVRKGK

SEQ ID NO: 155 - protein, 59 aa, Pichinde virus (PICV)
  Amino acid sequence of GP signal peptide in PICV
MGQVVTLIQSIPEVLQEVFNVALIIVSTLCIIKGFVNLMRCGLFQLITFLILAGRSCDG

SEQ ID NO: 156 - protein, 59 aa, Pichinde virus (PICV)
  Amino acid sequence of GP signal peptide in PICV
MGQVVTLIQSIPEVLQEVFNVALIIVSTLCIIKGFVNLMRCGLFQLITFLILAGRSCDS

SEQ ID NO: 157 - protein, 58 aa, Pichinde virus (PICV); identical to SEQ ID NO: 27
  Amino acid sequence of GP signal peptide in PICV

SEQ ID NO: 158 - protein, 214 aa, Pichinde virus (PICV)
  Amino acid sequence of GP1 protein in PICV
MMIDRRHNLTHVEFNLTRMFDNLPQSCSKNNTHHYYKGPSNTTWGIELTLTNTSIANETTGNFSNIRSLAYGNISNCDKTEEAGHTLKWLLNELHFNVLHVTRHVGARCKTVEGAGVLIQYNLTVGDRGGEVGRHLIASLAQIIGDPKIAWVGKCFNNCSGGSCRLTNCEGGTHYNFLIIQNTTWENHCTYTPMATIRMALQKTAYSSVSRKLL

SEQ ID NO: 159 - protein, 215 aa, Pichinde virus (PICV); identical to SEQ ID NO: 33
  Amino acid sequence of GP1 protein in PICV

SEQ ID NO: 160 - protein, 215 aa, Pichinde virus (PICV)
  Amino acid sequence of GP1 protein in PICV
SMMIDRRHNLTHVEFNLTRMFDNLPQSCSKNNTHHYYKGPSNTTWGIELTLTNTSIANETTGNFSNIRSLAYGNISNCDKTEEAGHTLKWLLNELHFNVLHVTRHVGARCKTVEGAGVLIQYNLTVGDRGGEVGRHLIASLAQIIGDPKIAWVGKCFNNCSGGSCRLTNCEGGTHYNFLIIQNTTWENHCTYTPMATIRMALQKTAYSSVSRKLL

SEQ ID NO: 161 - protein, 235 aa, Pichinde virus (PICV); identical to SEQ ID NO: 39
  Amino acid sequence of GP2 protein in PICV

SEQ ID NO: 162 - protein, 59 aa, Pirital virus (PIRV)
  Amino acid sequence of GP signal peptide in PIRV
MGQFITLMQSIPEALNMAFNVALVIVSLLCVTKGLINLWKCGIIQLLMFLALAGRSCDG

SEQ ID NO: 163 - protein, 58 aa, Pirital virus (PIRV)
  Amino acid sequence of GP signal peptide in PIRV
MGQFITLMQSIPEALNMAFNVALVIVSLLCVTKGLINLWKCGIIQLLMFLALAGRSCD

SEQ ID NO: 164 - protein, 216 aa, Pirital virus (PIRV)
  Amino acid sequence of GP1 protein in PIRV
EYKIDRRHVLSHVEFNLTRMFDNLPQSCSINNTHHYYKGPENTTWGVELTLTNTSVMNRSDENVTSIRSLGFGNITNCDKTGEAGHTLKWLLNELHFTVLHVTRHIGALCRTTAGAGLLIQYNLTTSDKGGEVGRHLIASLAQIIGDNKAAWVGKCYNNCTSSGKCSLTNCEGGTHYKFLVIQNTTWPNHCSYSPMSTVRMIIQKTAYSSVSRKLL

SEQ ID NO: 165 - protein, 217 aa, Pirital virus (PIRV)
  Amino acid sequence of GP1 protein in PIRV
GEYKIDRRHVLSHVEFNLTRMFDNLPQSCSINNTHHYYKGPENTTWGVELTLTNTSVMNRSDENVTSIRSLGFGNITNCDKTGEAGHTLKWLLNELHFTVLHVTRHIGALCRTTAGAGLLIQYNLTTSDKGGEVGRHLIASLAQIIGDNKAAWVGKCYNNCTSSGKCSLTNCEGGTHYKFLVIQNTTWPNHCSYSPMSTVRMIIQKTAYSSVSRKLL

SEQ ID NO: 166 - protein, 235 aa, Pirital virus (PIRV)
  Amino acid sequence of GP2 protein in PIRV
GFFTWDISDSSGQHVPGGYCLEQWAIVWAGIKCFDNSVMAKCNKDHNEEFCDTMRLFDFNQNAIKTLQLNVENSLNLMKKSINGLISDSLVIRNSLKQLAKIPYCNYTKFWYVNDTITGKHSLPQCWLVSNGSYLNETHFKNEWLWESQKLYNDMLLKEYEERQGNTPLALADLCFWSLVFFTTTVFFQLIGIPTHRHLIGEGCPKPHRLTSNSLCSCGFYKIPKKPFRWVRKGK

What is claimed:

1. An engineered arenavirus particle, wherein the genome of the arenavirus particle comprises:
a. an S segment that encodes (i) an arenavirus GP signal peptide, a buffer peptide, and a first heterologous non-arenaviral polypeptide or (ii) the arenavirus GP signal peptide and the buffer peptide under the control of an arenavirus genomic 3′ UTR and a heterologous non-arenaviral signal peptide, arenavirus GP1 and arenavirus GP2 under the control of an arenavirus genomic 5′ UTR;
b. an S segment that encodes NP under the control of an arenavirus genomic 3′ UTR and a second heterologous non-arenaviral polypeptide or no polypeptide under the control of an arenavirus genomic 5′ UTR; and
c. an L segment that encodes the L protein under the control of an arenavirus genomic 3′ UTR and the Z protein under the control of an arenavirus genomic 5′ UTR; or
wherein the genome of the arenavirus particle comprises:
d. an S segment that encodes (i) an arenavirus GP signal peptide, a buffer peptide, and a first heterologous non-arenaviral polypeptide or (ii) the arenavirus GP signal peptide and the buffer peptide under the control of an arenavirus genomic 3′ UTR and a second heterologous non-arenaviral polypeptide or no polypeptide under the control of an arenavirus genomic 5′ UTR;
e. an S segment that encodes NP under the control of an arenavirus genomic 3′ UTR and a heterologous non-arenaviral signal peptide, arenavirus GP1 and arenavirus GP2 under the control of an arenavirus genomic 5′ UTR; and
f. an L segment that encodes the L protein under the control of an arenavirus genomic 3′ UTR and the Z protein under the control of an arenavirus genomic 5′ UTR, wherein the first heterologous non-arenaviral polypeptide and the second heterologous non-arenaviral polypeptide are the same or different from each other.

2. The engineered arenavirus particle of claim 1, wherein the buffer peptide comprises or consists of a fragment of the arenavirus GP1.

3. The engineered arenavirus particle of claim 2, wherein the fragment of the arenavirus GP1 is shorter than the arenavirus GP1.

4. The engineered arenavirus particle of claim 3, wherein the fragment of the arenavirus GP1 comprises about, at most about, or at least about 1, 2, 3, 4, 5, 10, 15, 20, 25, 30, 35, 40, 45, 50, 55, 60, or more than 60 amino acids of the arenavirus GP1.

5. The engineered arenavirus particle of any one of claims 2 to 4, wherein the fragment of the arenavirus GP1 is the N-terminal fragment of the arenavirus GP1.

6. The engineered arenavirus particle of claim 1, wherein the buffer peptide comprises about or at most about 1%, 2%, 5%, 10%, 15%, 20%, 25%, 30% basic amino acids, or wherein the first 8 N-terminal amino acids of the buffer peptide comprise at most 1, 2, 3, 4, or 5 basic amino acids.

7. The engineered arenavirus particle of any one of claims 1-6, wherein the first 5 N-terminal amino acids of the buffer peptide comprise 1, 2, 3, 4, or 5 acidic and/or neutral and/or nonpolar aliphatic amino acids; wherein the first 6 N-terminal amino acids of the buffer peptide comprise 1, 2, 3, 4, 5, or 6 acidic and/or neutral and/or nonpolar aliphatic amino acids; wherein the first 7 N-terminal amino acids of the buffer peptide comprise 1, 2, 3, 4, 5, 6, or 7 acidic and/or neutral and/or nonpolar aliphatic amino acids; or wherein the first 8 N-terminal amino acids of the buffer peptide comprise 1, 2, 3, 4, 5, 6, 7, or 8 acidic and/or neutral and/or nonpolar aliphatic amino acids.

8. The engineered arenavirus particle of claim 7, wherein the last C-terminal amino acid of the buffer peptide is a basic amino acid; wherein the last 2 C-terminal amino acids of the buffer peptide comprise 1 or 2 basic amino acids; wherein the last 3 C-terminal amino acids of the buffer peptide comprise 1, 2, or 3 basic amino acids; wherein the last 4 C-terminal amino acids of the buffer peptide comprise 1, 2, 3, or 4 basic amino acids; or wherein the last 5 C-terminal amino acids of the buffer peptide comprise 1, 2, 3, 4, or 5 basic amino acids.

9. The engineered arenavirus particle of claim 7, wherein the 5 amino acids C-terminal to the first 5, 6, 7, or 8 N-terminal amino acids of the buffer peptide comprise about or at most about 1, 2, or 3 basic amino acids.

10. The engineered arenavirus particle of any one of claims 1-7, wherein the buffer peptide does not comprise basic amino acids.

11. The engineered arenavirus particle of any one of claims 1-10, wherein the first 3, 4, 5, 6, 7, or 8 N-terminal amino acids of the buffer peptide do not comprise basic amino acids.

12. The engineered arenavirus particle of any one of claims 1-11, wherein the buffer peptide comprises about or at least about 50%, 60%, 70%, 80%, 90%, 95%, 96%, 97%, 98%, 99%, or 100% acidic amino acids and/or neutral and/or nonpolar aliphatic amino acids.

13. The engineered arenavirus particle of any one of claims 1-12, wherein the first 3, 4, 5, 6, 7, or 8 N-terminal amino acids of the buffer peptide comprise about or at least about 75%, 80%, 85%, 90%, 95%, 96%, 97%, 98%, 99%, or 100% acidic amino acids and/or neutral and/or nonpolar aliphatic amino acids.

14. The engineered arenavirus particle of any one of claims 1-13, wherein the buffer peptide is about, at least about, or at most about, 1, 2, 3, 4, 5, 10, 15, 20, 25, 30, 35, 40, 45, 50, 55, 60, 65, 70, or more than 70 amino acids.

15. The engineered arenavirus particle of any one of claims 1-14, wherein any native signal peptide of the first heterologous non-arenaviral polypeptide has been truncated or deleted.

16. The engineered arenavirus particle of any one of claims 1-15, wherein the arenavirus GP signal peptide can be cleaved from the buffer peptide or a portion thereof by a signal peptide peptidase.

17. The engineered arenavirus particle of claim 16, wherein the signal peptide peptidase cleaves immediately N-terminal to the buffer peptide, after the first N-terminal amino acid of the buffer peptide, after the second N-terminal amino acid of the buffer peptide, after the third N-terminal amino acid of the buffer peptide, after the fourth N-terminal amino acid of the buffer peptide, or after the fifth N-terminal amino acid of the buffer peptide.

18. The engineered arenavirus particle of any one of claims 1-17, wherein any native signal peptide of the second heterologous non-arenaviral polypeptide is retained.

19. The engineered arenavirus particle of any one of claims 1-18, wherein the arenavirus GP signal peptide is cleaved at exactly the position where the buffer peptide starts, at amino acid 1, 2, 3, 4, 5, 6, 7, 8, 9, 10, or more than 10 amino acids N-terminal from where the buffer peptide starts, or at amino acid 1, 2, 3, 4, 5, 6, 7, 8, 9, 10, or more than 10 amino acids C-terminal from where the buffer peptide starts.

20. The engineered arenavirus particle of any one of claims 1-19, wherein the buffer peptide is about, at least about, or at most about, 1, 2, 3, 4, 5, 10, 15, 20, 25, 30, 35, 40, 45, 50, 55, 60, 65, 70, or more than 70 amino acids.

21. The engineered arenavirus particle of any one of claims 1-20, wherein the arenavirus particle is derived from an arenavirus of Clade A.

22. The engineered arenavirus particle of claim 21, wherein the arenavirus of Clade A is Pichinde virus (PICV).

23. The engineered arenavirus particle of any one of claims 1-22, wherein the sequence of the arenavirus GP signal peptide, the buffer peptide, and the first heterologous non-arenaviral polypeptide is from N-terminus to C-terminus.

24. The engineered arenavirus particle of any one of claims 1-23, wherein the arenavirus GP signal peptide, the buffer peptide, and the first heterologous non-arenaviral polypeptide form a fusion protein.

25. The engineered arenavirus particle of any one of claims 1-24, wherein the heterologous non-arenaviral signal peptide is the signal peptide of vesicular stomatitis virus glycoprotein.

26. The engineered arenavirus particle of any one of claims 1-25, wherein inter-segmental recombination of the two S segments, uniting two arenavirus ORFs on only one instead of two separate S segments, results in a bi-segmented arenavirus that is not viable or that in cell culture reaches peak titers that are lower than or equivalent to the tri-segmented arenavirus from which the bi-segmented arenavirus was recombined.

27. The engineered arenavirus particle of any one of claims 1-26, wherein the arenavirus GP1 and arenavirus GP2 comprises an amino acid sequence starting at about amino acid 59 to about 508 of SEQ ID NO:3, or a biologically active fragment thereof.

28. The engineered arenavirus particle of any one of claims 1-27, wherein the GP signal peptide fused to the buffer peptide comprises or consists of an amino acid sequence that is about or at least about 95%, 96%, 97%, 98%, 99%, or 100% identical to the sequence of amino acid 1 to amino acid 5, 10, 15, 20, 25, 30, 35, 40, 45, 50, 51, 52, 53, 54, 55, 56, 57, 58, 59, 60, 61, 62, 63, 64, 65, 66, 67, 68, 69, 70, 71, 72, 73, 74, 75, 76, 77, 78, 79, 80, 81, 82, 83, 84, 85, 86, 87, 88, 89, 90, 91, 92, 93, 94, 95, 96, 97, 98, 99, 100, 101, 102, 103, 104, 105, 106, 107, 108, 109, 110, 111, 112, 113, or longer than amino acid 113 of SEQ ID NO:3.

29. The engineered arenavirus particle of claim 28, wherein the GP signal peptide fused to the buffer peptide comprises or consists of an amino acid sequence that is the sequence of amino acid 1 to amino acid 66 of SEQ ID NO:3.

30. The engineered arenavirus particle of claim 28, wherein the GP signal peptide fused to the buffer peptide comprises or consists of an amino acid sequence that is the sequence of amino acid 1 to amino acid 81 of SEQ ID NO:3.

31. The engineered arenavirus particle of claim 28, wherein the GP signal peptide fused to the buffer peptide comprises or consists of an amino acid sequence that is the sequence of amino acid 1 to amino acid 113 of SEQ ID NO:3.

32. The engineered arenavirus particle of claim 1, wherein the coding sequence of the first heterologous non-arenaviral polypeptide starts at about amino acid 60 or more than about 60 amino acids downstream of the methionine start codon of the GP signal peptide.

33. The engineered arenavirus particle of any one of claims 1 to 32, wherein the first heterologous non-arenaviral polypeptide, the second heterologous non-arenaviral polypeptide, or both heterologous non-arenaviral polypeptides are each an antigen derived from an infectious organism, tumor, or allergen.

34. The engineered arenavirus particle of claim 33, wherein the antigen is selected from the group consisting of
a. viral antigens, wherein the viral antigen is from a virus family selected from the group consisting of adenoviridae, herpesviridae, leviviridae, orthomyxoviridae, parvoviridae, filoviridae, hantaviridae, poxviridae, papillomaviridae, polyomaviridae, paramyxoviridae, pneumoviridae, picornaviridae, reoviridae, retroviridae, flaviviridae, hepadnaviridae, togaviridae, rhabdoviridae, arenaviridae, and coronaviridae;
b. bacterial antigens, wherein the bacterial antigen is from a bacteria family selected from the group consisting of Aquaspirillum family, Azospirillum family, Azotobacteraceae family, Bacteroidaceae family, Bartonellaceae family, Bdellovibrio family, Campylobacteraceae family, Chlamydiaceae family, Clostridiaceae family, Enterobacteriaceae family, Gardinella family, Pasteurellaceae family, Halobacteriaceae family, Helicobacter family, Legionallaceae family, Listeriaceae family, Methylococcaceae family, mycobacteriaceae, Neisseriaceae family, Oceanospirillum family, Pasteurellaceae family, Streptococcaceae family, Pseudomonadaceae family, Rhizobiaceae family, Spirillum family, Spirosomaceae family, Staphylococcaceae family, Helicobacter family, Yersinia family, Bacillus antracis and Vampirovibrio family, and
c. tumor neoantigens or neo-epitopes and tumor associated antigens; and wherein the tumor associated antigen is selected from the group consisting of artificial fusion protein of HPV 16 E7 and E6 proteins, oncogenic viral antigens, cancer-testis antigens, oncofetal antigens, tissue differentiation antigens, mutant protein antigens, Adipophilin, AIM-2, ALDHIAI, BCLX (L), BING-4, CALCA, CD45, CPSF, cyclin DI, DKKI, ENAH (hMcna), Ga733 (EpCAM), EphA3, EZH2, FGF5, glypican-3, G250/MN/CAIX, HER-2/neu, IDOI, IGF2B3, IL13Ralpha2, Intestinal carboxyl esterase, alphafoetoprotein, Kallikrein 4, KIF20A, Lengsin, M-CSF, MCSP, mdm-2, Meloe, MMP-2, MMP-7, MUCI, MUC5AC, p53 (non-mutant), PAX5, PBF, PRAME, PSMA, RAGE, RAGE-I, RGS5, RhoC, RNF43, RU2AS, secernin 1, SOX10, STEAPI (six-transmembrane epithelial antigen of the prostate 1), survivin, Telomerase, VEGF, WT1, EGF-R, CEA, CD20, CD33, CD52, MELANA/MART1, MART2, NY-ESO-1, p53, MAGE A1, MAGE A3, MAGE-4, MAGE-5, MAGE-6, CDK4, alpha-actinin-4, ARTC1, BCR-ABL, BCR-ABL fusion protein (b3a2), B-RAF, CASP-5, CASP-8, beta-catenin, Cdc27, CDK4, CDKN2A, CLPP, COA-1, dek-can fusion protein, EFTUD2, Elongation factor 2, ETV6-AML, ETV6-AML1 fusion protein, FLT3-ITD, FNl, GPNMB, LDLR-fucosyltransferase fusion protein, NFYC, OGT, OS-9, pml-RARalpha fusion protein, PRDX5, PTPRK, H-ras, K-ras (V-Ki-ras2 Kirsten rat sarcoma viral oncogene), N-ras, RBAF600, SIRT2, SNRPD1, SSX, SSX2, SYT-SSXl or -SSX2 fusion protein, TGFbetaRII, Triosephosphate isomerase, ormdm-2, LMP2, HPV E6, HPV E7, EGFRvIII (epidermal growth factor variant III), Idiotype, GD2, ganglioside G2), Ras-mutant, p53 (mutant), Proteinase3 (PRI), Tyrosinase, PSA, hTERT, Sarcoma translocation breakpoints, EphA2, prostatic acid phosphatase PAP, neo-PAP, ML-IAP, AFP, ERG (TMPRSS2 ETS Fusion gene), NAI 7, PAX3, ALK, Androgen Receptor, Cyclin B1, Polysialic acid, MYCN, TRP2, TRP2-Int2, GD3, Fucosyl GMI, Mesothelin, PSCA, sLe(a), cyp1B1, PLACI, GM3, BORIS, Tn, GLoboH, NY-BR-I, SART3, STn, Carbonic Anhydrase IX, OY-TESI, Sperm protein 17, LCK, high molecular weight melanoma-associated antigen (HMWMAA), AKAP-4, SSX2, XAGE 1, B7H3, Legumain, Tie 2, Page4, VEGFR2, MAD-CT-I, FAP, PDGFR-beta, MADCT-2, For-related antigen 1, TRPI, GP100, CA-125, CA19-9, Calretinin, Epithelial membrane antigen (EMA), Epithelial tumor antigen (ETA), CD19, CD34, CD99, CDI 17, Chromogranin, Cytokeratin, Desmin, Glial fibrillary acidic protein (GFAP), gross cystic disease fluid protein (GCDFP-15), HMB-45 antigen, Myo-D1, muscle-specific actin (MSA), neurofilament, neuronspecific enolase (NSE), placental alkaline phosphatase, synaptophysis, thyroglobulin, thyroid transcription factor-1, dimeric form of the pyruvate kinase isoenzyme type M2 (tumor M2-PK), BAGE BAGE-1, CAGE, CTAGE, FATE, GAGE, GAGE-I, GAGE-2, GAGE-3, GAGE-4, GAGE-5, GAGE-6, GAGE-7, HCA661, HOM-TES-85, MAGEA, MAGEB, MAGEC, NA88, NY-SAR-35, SPANXBI, SPAI 7, SSX, SYCP1, TPTE, Carbohydrate/ganglioside GM2 (oncofetal antigen-immunogenic-1 OFA-I-1), GM3, CA 15-3 (CA 27.29BCAA), CA 195, CA 242, CA 50, CAM 43, CEA, EBNA, EF2, Epstein-Barr virus antigen, HLA-A2, HLA-Al 1, HSP70-2, KIAAO205, MUM-I, MUM-2, MUM-3, Myosin class I, GnTV, Herv-K-mel, LAGE-I, LAGE-2, (sperm protein) SPI 7, SCP-I, P15(58), Hom/Mel-40, E2A-PRL, H4-RET, IGH-IGK, MYL-RAR, TSP-180, P185erbB2, p180erbB-3, c-met, nm-23H1, TAG-72, TAG-72-4, CA-72-4, CAM 17.1, NuMa, 13-catenin, P16, TAGE, CT7, 43-9F, 5T4, 791Tgp72, 13HCG, BCA225, BTAA, CD68KP1, CO-029, HTgp-175, M344, MG7-Ag, MOV18, NB70K, NYCO-1, RCAS1, SDCCAG16, TA-90, TAAL6, TLP, TPS, CD22, CD27, CD30, CD70, prostein, TARP (T cell receptor gamma alternate reading frame protein), Trp-p8, integrin αvβ3 (CD61), galactin, or Ral-B, CD123, CLL-1, CD38, CS-1, CD138, and ROR1.

35. The engineered arenavirus particle of any one of claims 1 to 34, wherein the genome of the arenavirus particle encodes the first heterologous non-arenaviral polypeptide and/or the second heterologous non-arenaviral polypeptide; wherein the growth or infectivity of the arenavirus particle is not inferior to a second arenavirus particle; wherein the genome of the second arenavirus particle encodes the same first heterologous non-arenaviral polypeptide and/or the same second heterologous non-arenaviral polypeptide; and wherein all arenaviral GP, NP, Z and L in the second arenavirus particle are each expressed as one ORF.

36. The engineered arenavirus particle of any one of claims 1 to 35, wherein the titer of the arenavirus particle is at least about 1%, 2%, 3%, 4%, 5%, 6%, 7%, 8%, 9%, 10%, 15%, 20%, 30%, 40%, 50%, 60%, 70%, 80%, 90%, 100%, 1.5-fold, 2-fold, 3-fold, 4-fold, 5-fold, 6-fold, 7-fold, 8-fold, 9-fold, 10-fold, 12-fold, 15-fold, 18-fold, 20-fold, 25-fold, or 30-fold lower during a persistent infection in AGRAG mice than the titer of the respective wild-type parental arenavirus particle.

37. The engineered arenavirus particle of any one of claims 1 to 36, wherein the arenavirus particle expresses a heterologous non-arenaviral polypeptide under control of an arenavirus genomic 3′ UTR; wherein the arenavirus particle induces at least about 1%, 2%, 3%, 4%, 5%, 6%, 7%, 8%, 9%, 10%, 15%, 20%, ³⁰, 40%, 50%, 60%, 70%, 80%, 90%, 100%, 1.5-fold, 2-fold, 3-fold, 4-fold, 5-fold, 6-fold, 7-fold, 8-fold, 9-fold, 10-fold, 12-fold, 15-fold, 18-fold, 20-fold, 25-fold, or 30-fold higher immune responses against the heterologous non-arenaviral polypeptide in a subject after the arenavirus particle is administered to the subject as compared to after another arenavirus particle expressing the same heterologous non-arenaviral polypeptide under control of an arenavirus genomic 5′ UTR is administered to the subject or to a comparable subject.

38. A set of cDNAs from which the genomic segments of the engineered arenavirus particle of any one of claims 1 to 37 can be transcribed.

39. A set of DNA expression vectors comprising the cDNAs of claim 38.

40. A host cell comprising the set of cDNAs of claim 38 or the set of DNA expression vectors of claim 39.

41. A method of manufacturing the engineered arenavirus particle of any one of claims 1 to 37, comprising maintaining the host cell of claim 40 under conditions suitable for virus formation and harvesting the engineered arenavirus particle.

42. A pharmaceutical composition comprising the engineered arenavirus particle of any one of claims 1 to 37 and a pharmaceutically acceptable carrier.

43. Use of the engineered arenavirus particle of any one of claims 1 to 37 for treating or preventing disease in a human patient.

44. A nucleotide sequence comprising an open reading frame encoding a polypeptide consisting of an amino acid sequence that is about or at least about 95%, 96%, 97%, 98%, 99%, or 100% identical to the sequence of amino acid 1 to amino acid 5, 10, 15, 20, 25, 30, 35, 40, 45, 50, 51, 52, 53, 54, 55, 56, 57, 58, 59, 60, 61, 62, 63, 64, 65, 66, 67, 68, 69, 70, 71, 72, 73, 74, 75, 76, 77, 78, 79, 80, 81, 82, 83, 84, 85, 86, 87, 88, 89, 90, 91, 92, 93, 94, 95, 96, 97, 98, 99, 100, 101, 102, 103, 104, 105, 106, 107, 108, 109, 110, 111, 112, 113, or longer than 113 of SEQ ID NO:3.

45. The nucleotide sequence of claim 44, wherein the nucleotide sequence comprises an open reading frame encoding a polypeptide consisting of amino acid 1 to 66 of SEQ ID NO:3.

46. The nucleotide sequence of claim 44, wherein the nucleotide sequence comprises an open reading frame encoding a polypeptide consisting of amino acid 1 to 81 of SEQ ID NO:3.

47. The nucleotide sequence of claim 44, wherein the nucleotide sequence comprises an open reading frame encoding a polypeptide consisting of amino acid 1 to 113 of SEQ ID NO:3.

48. The engineered arenavirus particle of any one of claims 1-27, wherein the GP signal peptide fused to the buffer peptide comprises or consists of an amino acid sequence that is about or at least about 95%, 96%, 97%, 98%, 99%, or 100% identical to the sequence of amino acid 1 to amino acid: 5, 10, 15, 20, 25, 30, 35, 40, 45, 50, 51, 52, 53, 54, 55, 56, 57, 58, 59, 60, 61, 62, 63, 64, 65, 66, 67, 68, 69, 70, 71, 72, 73, 74, 75, 76, 77, 78, 79, 80, 81, 82, 83, 84, 85, 86, 87, 88, 89, 90, 91, 92, 93, 94, 95, 96, 97, 98, 99, 100, 101, 102, 103, 104, 105, 106, 107, 108, 109, 110, 111, 112, 113, or longer than amino acid 113 of SEQ ID NO:6.

49. The engineered arenavirus particle of claim 48, wherein the GP signal peptide fused to the buffer peptide comprises or consists of an amino acid sequence that is the sequence of amino acid 1 to amino acid 66 of SEQ ID NO:6.

50. The engineered arenavirus particle of claim 48, wherein the GP signal peptide fused to the buffer peptide comprises or consists of an amino acid sequence that is the sequence of amino acid 1 to amino acid 81 of SEQ ID NO:6.

51. The engineered arenavirus particle of any one of claims 1-27, wherein the GP signal peptide fused to the buffer peptide comprises or consists of an amino acid sequence that is about or at least about 95%, 96%, 97%, 98%, 99%, or 100% identical to the sequence of amino acid 1 to amino acid: 5, 10, 15, 20, 25, 30, 35, 40, 45, 50, 51, 52, 53, 54, 55, 56, 57, 58, 59, 60, 61, 62, 63, 64, 65, 66, 67, 68, 69, 70, 71, 72, 73, 74, 75, 76, 77, 78, 79, 80, 81, 82, 83, 84, 85, 86, 87, 88, 89, 90, 91, 92, 93, 94, 95, 96, 97, 98, 99, 100, 101, 102, 103, 104, 105, 106, 107, 108, 109, 110, 111, 112, 113, or longer than amino acid 113 of SEQ ID NO:120.

52. The engineered arenavirus particle of claim 51, wherein the GP signal peptide fused to the buffer peptide comprises or consists of an amino acid sequence that is the sequence of amino acid 1 to amino acid 66 of SEQ ID NO:120.

53. The engineered arenavirus particle of claim 51, wherein the GP signal peptide fused to the buffer peptide comprises or consists of an amino acid sequence that is the sequence of amino acid 1 to amino acid 81 of SEQ ID NO:120.

54. A method of immunizing a subject suspected of having, diagnosed with, or at risk of developing a disease or disorder, comprising:
a. administering a first engineered arenavirus particle to the subject, wherein the first engineered arenavirus particle is the engineered arenavirus particle of any one of claims 1-37 and 48-53; and
b. administering a second engineered arenavirus particle to the subject, wherein the second engineered arenavirus particle is the engineered arenavirus particle of any one of claims 1-37 and 48-53, wherein the first engineered arenavirus particle is derived from a first arenavirus species and the second engineered arenavirus particle is derived from a second arenavirus species.

55. The method of claim 54, wherein the first engineered arenavirus particle and the second engineered arenavirus particle are derived from the same arenavirus species.

56. The method of claim 54, wherein the first engineered arenavirus particle and the second engineered arenavirus particle are derived from different arenavirus species.

57. The method of claim 55, wherein the same arenavirus species is PICV.

58. The method of claim 55, wherein the same arenavirus species is LCMV.

59. The method of claim 55, wherein the same arenavirus species is Tamiami virus (TAMV).

60. The method of claim 55, wherein the same arenavirus species is Tacaribe virus (TCRV).

61. The method of claim 56, wherein the first arenavirus species is LCMV and the second arenavirus species is PICV.

62. The method of claim 56, wherein the first arenavirus species is PICV and the second arenavirus species is LCMV.

63. The method of claim 56, wherein the first arenavirus species is LCMV and the second arenavirus species is TAMV.

64. The method of claim 56, wherein the first arenavirus species is TAMV and the second arenavirus species is LCMV.

65. The method of claim 56, wherein the first arenavirus species is LCMV and the second arenavirus species is TCRV.

66. The method of claim 56, wherein the first arenavirus species is TCRV and the second arenavirus species is LCMV.

67. The method of claim 56, wherein the first arenavirus species is TAMV and the second arenavirus species is PICV.

68. The method of claim 56, wherein the first arenavirus species is PICV and the second arenavirus species is TAMV.

69. The method of claim 56, wherein the first arenavirus species is TCRV and the second arenavirus species is PICV.

70. The method of claim 56, wherein the first arenavirus species is PICV and the second arenavirus species is TCRV.

71. The method of claim 56, wherein the first arenavirus species is TCRV and the second arenavirus species is TAMV.

72. The method of claim 56, wherein the first arenavirus species is TAMV and the second arenavirus species is TCRV.

73. The method of any one of claims 54-72, wherein the disease or disorder is an infection.

74. The method of any one of claims 54-72, wherein the disease or disorder is a cancer.
